United States Patent Application Publication US 2026/0357256 A1 - sequence listing, part 25

SEQ ID NO: 9 - DNA, 58617616 bp, Homo sapiens (residues 52,104,553-54,275,575 of 58,617,616)
  source 1..58617616: mol_type = genomic DNA
gaaatccagaagagacatatttggcttatttggtataaaaatcatacaggaagcattgtcaaatacaaaatggtgtttggctttctgtgggctgtacttgtataaatatgaaattggcatgtattccaaaattatggaaaactcttataattctgatatgacttactatatgttattattttattttttgagatggaatctcactctgtcacccaggctggagtgcagtggcaccatcttggctcactgcaacctctgcatcctgggttcaagcaattcccctgcattagcctcgcaagtacctgagactataggtgtgcaccatcacacctggttaatgtttgtatttttagtagagatgcggtttcaccatgttggtcaggctggtcttgaactcctgacctcaacccacctcagcctcacaaagtgctgcaattacagatgtgagtgactgtgcccagccacatgttattaataattataattgttggctgggcatggtggctcaaacctataatcccaaaactttgggaggccaaggcaggcggatcacctgaggtcaggagttcaagaccagcctgaccaacatggagaaaccccatctctactaaaaatacaaaattagtcgggtgtagtggcgcatgcctgtagtcccagctactcagaaggctgaggcaggagaatcgcttgaaccccagaggagaggttgtggtgagcccagattgtgccactgcactccagcctgggcaacaagagcaaaactctgtctcaaaaaataataataattattattattattgactattatgtaaaatggtggtatgtcacagaagtaaccaaaatttccattatagtcaattgtggttttaataacagctgtcctgagacattttgttgccacaggcaattgttgtcttgtttggatcctcttcaaaagttggtttataatcagctacaggaatttgataggtgctctggaatgcaagtttctgataactttggaaaatgtgacattagaatagaggaatagaggaaagaactttcaaaactttcatggataactaaaatgttcatgaatatcaaacacaacacacattaactgcatggactgaactaataggagtctaaagtaatctttctgattttttcttttgatcctttgttttgttttgcagagtcaaggaaacttttcttttgagctattgacagcaattttttttttttttgagacagttgcccaggctggagtgcaatggcatgatctgggttcactgcagcccctgcctcccagcctcccaggttcaagcgattctcctgcctcagcctcccaagtagctgggattacaggcacccaccatcatgcccaggtaatttttgtagagacggggtttcaccatgttggccaggctgatctcgaactcctgacctaaggtgatccgcccaccttgcctcccaaagtgctgggattataggcatgagccaccgtgcccagccgacagcatttaacaattgaggaaagtatactgctgtgaagaaaatttggaacatatttgtttctctctacctgctttctccagaatttggaaactatttctgagtattcttttttttttttttttttttttttgagatggagtctcactctgttgccaggctggaatgcagtggcacgatcttggctcactgcaacctctgcctcccgaggtcaagcgattctcctgcctcagcctcctgagtagctgggactacaggcatgtgccaacacacccagctaatttttgtatttttagtagagacggggtttcaccatgttggccaggatggtcttgatctcttgacctcgtgatctgcctgcctcagcctcccaaagtgctgggattacaggcgtgagccatggcgcccagcttacgtttttcaatttttatgattttccacagtttggactgaattctaattttttccagctacatgtctctgaaataatgttttcaattttttcttctttcttttcttttttcccccatattttctaatttgaaatcactgaaaactaaactgtattttcttgaagccctgataactgaagctagacaacttaaacttcagaagaaaataacagcaacctattcacatacataagccactttcatacctatctactgatgtatggacttcagagtaatatggcctgtatctattttccaggattattctttgtttttcttccttcctcctgctattttctcttcataggacacgacactttacaaactgctaaaaatgagctttccaaataacatgggacttgcccacctgaaaataaactgtcctagccatgaaggatcagatgaaacctgatttttttttttttgagacggagtctcgttctgtccccaggctggagtgcagtaacgtaatctgggctcactgcaacctctgccttgcaggttcaagtgattctcctgcctcagcctcctgagtagctgggactacaggcatgtgccactacgcctggctaatttttgtatttttagtagagatggggtttcaccacgttggccaggatggtctccatctcttgacctcgtgatccgcccgccttggcctcccaaaatgctgagattacaggcgtgagccaccgcacccagcctctcccaaagatttttaaaggagaaaaggggaaatgtgaaaggaaaataaatcttggcacccaacactcactaagccaaagggaaaagtcaagctgggaactgcttagggcaaacatgcttcccattctattcaaatcatccctctgctcactgagataaatgtgtgtgattgcttcctttgaaaatgcttaccagaaacccaaaagaatgcaacctttgtcttttatctacccgatgacctggaagcaccctccctgcttggacttaccctgcctttccaaaccaaaccaatgtgcatcttacacattaactgatatctcctaaaagtgtataaaaccaagctgcgccccaaccaccttgggtatatgtggccaggacctcttgaggctgtgtcacaggcaagcatccttaactttggcaaataaacttgcaaaattgactggaacaaaagaagtaatcttcagagaaaataaaaataacagggaaaaacagggagattacatgataaaaatgtcaacttacaaagatgatttcagaaccatcagtgtgtatgcactaaaaaacagctgcaaaacgtgaagcaataagtgacagaagtgaaagaaatacacaaatttagactgagcaaagaggattattagggtagtcaaagtactctgtatgttaccataatatgtgaatatgtgccattttacagttgtccaaacccacacaatgtacaagtgtgagccaactataaactagggatgttggatgataatctaccactttggtggaggatgttgacaatggggaaggctatgcatatgtgggggaaggagctatatgagaaatctctgtaccttccactgaattttgctgggaaccaaaaattgctctacaaagtaaagtatatcatagaaaaaaaattgaattagaaaataggttaaaaatatgagaaatttcaccgatgcagatgcacaaataggcaaacgaaaagattttccatattactgtccatcaagtctcagaaattaacaatgttctatttctttattgtaattgaaaactgaacagcaaatgaatttttatggtttgttttctccaacaaacttaataatattaaaatatgtgagaaataatatttattgcaacaggttatgagggtggaaacaaacagtctcacaatttgctagaagcataacagagcttactgacattttcaaggaaaaacaacaaagaaagaagtcatcaaacaagatggtatcttgacaaaggcacagagctccacaactgcttcatactctgcacacaataaatcctctcagagagatgaaaggagtgatgacaaatgggcttgcatttgagctgtggacactatcactggtattattcatataaccagggctctatatcacccctctggagaagaaagtgcaacacaaagtctgtgtaacaaaggaaagcaaaagtagcaataaaggtccagagaaatacacacatgcaaatacagtactgcaaactcagtaaaaggagtttttgactggagtgtgaactttcaacttgaagatacatttcgcagggacattcacccaaagcttgagagctagagcagagagacttgcttgcagtcagtaactgagtagatgaaatgcgtaatttttcactaggtgataattccctttgggaagaagtgccttatctttaattattccactttttgttatatggttcatgcttttgaactgcagttgtctgaaacttgcttgctattgaattgtgtaacaccagataatagcaggttgtcaaaagataaccccagtggataatttaagctgcttttatgagaagcctggtgctaagctgccttacacagtctttttacagtaaccataaaaaaaactgagtttatttgatcatgtattatcccttttcatataaggtcatattagaggaattcttggaagaggttttcaaactagtcctttgggcatttaaaaaatcattatataaacgtacacttcttcaatacataagaacaaacatttttcctttacaaaaaaacctcatttttaggccaaaataaattacaacttgctgaaataccttttatggctcagtgctcattccagctatataaaattatattttttgcacatcttcagaaattagagatactgagagagagtggttactttttttaggggggcggtgatggaatttcactctgtctcccaggttagagtgcagtggcgcaatatcggctcactacaacctccacccacagcgttcaaatgattctcctgcctcagcctcccaagtagctgggattacaggcacctgacaccatgcccggctaatttttgtatttttagtaaagatgtggtctcaccatattggtcaggctggtctcaaacttgacctcaggtgatccacctacctcggcctcccaaagtgctgggattacaggcgtgagccactgcacccggccagagagagagtggttacttctaaaatgacatgatgatataaccctggcttagggaacagatcaagttctaaatctcaggaataaaagatactcattatccaagccatatagtcttgtactatatacatattaacagtctatgcaatgaaaaatgaagaacagaaatttcataaaactttaaaaacacacaacataggcagggtgtggtagctcatgcctgtaatcccagcactttgggaggtcgaggcgagcagatcatctgaggttgggagtttgagaccagcctgaccaacagggagaaaccccatctctactaaaaatacaaaattagctgggtgtggtggtgcatgcctgtaatcccagccacttgggaggctgaggcagaagaatcgcttgaacccaggaggcagaggttgtggtgagccgagatcgcgccattgcactccagtctgggcaacaagaacaaaactctgtctcaaaaacaacagcaacaacaacaacaaaaaagacaaaataacacaacataaaaatgtaaagaaaacatttcatgtacaagctactccatttggcaacgtgtactaagataaaaacttatctacaaacagaatataacacaaagaaaatgtgatttaaggagtgatctcaggtccacagctcttcagttcttccaaatttgtagatcagagtggttgggtaacatatgcaccaaaaagaatccacatggaagcaataagtaccccaaacatcaacatgaaaccaacgaaaagccaaactcaaggacctgttcttcctaaacagccactttcatagctatcacctctcacctgagcattggatacagcatttatcatgaagaaagccaatgtgggaaatacaccacatgtgtgaaaggcatggttcaactgttctggcctacaatacaccactgctgcgtcattatccaccagcctgtaaaaaacaatatacctgtcacaacagacgccacaacatttcttctctcactcgtcaatacattcacattctggccattgaaaattatctaggaagactgccattttctacttcttaagcataaatttttcattaaatgctgtatccccacttcctcaaacacccacgcggacttcaggcatgtgcacaaggaagactgctgctccgcagtctggccggcatcctccagctccacctcagccttgggagcccacaatgttctatttttatttgatcccatctgcttccagcaatcactgaaaagaaacagcctttaccaaacactccaaaatgtctttgtggtgacgtcattaggaactcataactgtccccaggaattcgcagtgggaacaaaggttttcaggaatattctcagctcaccaagcttgcacattatcaatattggtgaattgacaaattgcagttttttgcaaagctgctatctcagaatcacaaacttacatctcacaatcagctggctccctccccccaagacattggtacagtcatcccacattagctgctgttttgctttccatgatttcaattaccagtggcaactgtggcccaaaaacattaaatggaatattcccaaaataaataactcggaaattttaaactgtacactgttctcactaatgtgatgaaatttcacattgttccacccaggacataaatcatccctttatacggtgtagccacacagaataacctacccctctctcagtcacttagtagtcatctcagttagcgttgttagagtatcatcgtgtttgtgttcaagtatctcctattttacttaattatggccccaaagcacaaaagtagtgaggcttgcaacttggatatctcagagaagctgtaagctagacacaatagcatgtacctgtagtctcaggtagtctggaggctgaggtgggaggaccactttttgacgctgcagtgtgctaagatcttacctgtgaataaccactgcactcagcctgggtgacatagcaaaaccccctaacaaaaaaaaaaaaaaaaaaaaaaaaaaaagagaaagcaagaaagctgtaaagcgcctcctttaagttaaaaagtgaaaggttattgatttaataagaaaaaaatacagatgaagatgctaagatttatcataaatcttctgtacaagtgtgaataaaaataatcagtactagctttgctgtcacacctcaaaacttgactgaaactatatatttatggttgggtactatccactttcaggtatccactagaggacacttggaaggcatcttgtgggttaaagggggactatggtatgggcaaaaatctatgttgtttgatttcgccatagaaaacaattgtcgcacattattttaaccagcagagtgtaatgcagtgtctgttagaagttctttactaaggtgggataaatctgtgttggtgaaaggaacgtcactgagttacgaaaacgaataacattttattaattgaaccatgagacttctgatacattttgaatgtaacagcagtaaaatatagagtaaatacttcaatgtgaatctggcctgtgaccatgctattctgattcttttgattaaattctcctctctgataactgctgtcttccacttccaagaataagactaattttacatttatctttgctatataacagctgtcattcaatggagatgatcatcatttcctctgcattatttctcccacacaatccatccctagtaacctatcacttgcctctcatgaatacccttaatattccatcaatgtcctcactggtatttcagtcagttggttgtgcaattattttctacaacccaaagtggcactctacgtgttcatggacacctggaacacaagcacaacttacatcataaacttacattattctcccagttactccatggtgtgtaactcacagaatattgaattttaaaattcagtgaccttaatcttcaggaagcatggaaatgaaggagccacactgaatgaaggaggctctctcatcttgttgattcattcccagataccacaatgaaggatatgtaaggaagatgatagacttcaaaccttaggataaacgtcatagtctagtagctattttaagaaacgccccattggccaggtgtggtggctcatgcctgtaatctcagcaacgtgtgaggccaaggtggcaaatcacttgaggccaggagcttgagatcagcctggcaaacatggtaaaacaccatctctacaaaaaaatataaaaattatctggacatggtggcatgactgtaatcccagctacttgggaggctgaggcacaaattgcttgaaaccaggatgtggaagttacagtgaggtgaactggtgccactgcactacagcatggggaacagagcaagactgtcacaaaagaaaaaaaacagaaacctcaaatttaatgtaatattttataaactgaatgagccattttcacacatgcacttgctcctttaaaatacatactgtcctgagttttaacaaatgttgtctggtagttattctgtaataatattccaggccaatcttggagaagcagatttggttatccctagtatgatttcaaagatgtgtagtctgtttaaaaaactggttgaaatttgtgccacattgattacatttccaagttttctctcaagtagggataatttggtaaaggctgaagacacactactgcttccaggtcctttcatgttcagcatacttacaggatttttctcctttatacgttcaatcaaactgcaaaggcgtggacattggttttgtctcactttaagttctgggtacatgtgcacaatttgcaaatttgttacataggaaaatgtgtgccatggtggtttgctgcatctaccaacccatcacctggtattaaggcaaaaatgcattagctatttgtcctgatgctccacttccctgcccttcccacccccatcagcaggccccagtgtgtgttgctcccctccctgggtatatgtgttctcattgttcagcttccacttttaagtgagaacatgtgctgtttgattttctgttcctgtgttagtttcctgaggataatggcttccagctccatccacatcgctgcaatggacatgatctcattcctttctatggctgcatagtatcccatggtgtatatgtaccacattttctttattcagtctatcactgataagcatttgggttgattccaggtctttgaacatttcattttttaaaaccatttatttggaaggttgtctctagtatgaatactctttccattttgatgttcgggtaaaaaccttagcatgcacattacatttctgtggttcctctcaaagatgtatattctgatgcctagtgagttccaatgcctggggaaagcctctgacacatacatttatatgatttcctttcagtataaactctcttatgacaagtagtgattgaactctagtaaaggttttgccaccctcatttcatttcatacatctatgcccttttaattacctagatttacaagttctggcttttgagtagaattcttgccacacgtattacacttctgtgatttttctccaggatgtatacatcctggaatatatatacaaattcttacacctagtgagtagtgaatactagcttaaaacttaggtatatttactgcatgtgtaaatgtattaggtcataactgcattgctacaaaaaaaaacctgaggctggctaatgtataaagaaaagagtttaattggctcatatttctgaaggcttaaatgaaaacatggtgctggcatctgatcaccctctagggaagcctcaggaaggttaaaatcatggtggaaggcaaagcgggtgtcggtatttcacatggtgagaatgagggcaagcgacagggaagtgctatgcacttctaaacagccagacctcaagagaagtcactattgccaggacagcaccaaggggatgacgctacatctttctcagtttgagaaatccacttccatgattcaatcacctcccaatgggccccacctccaatactggagattacaattccacagggatttcaagagaaggggtaaatatacaaggtatatcagtaagtaggaattattcggtgattccagaaactaggacaacgtctaaggccttgtcacattgagtttagttgtaaggctctctccagtatgtcttattcgatgtttagtgaggcctgagcgacaaataaaagatttcccacactcattacatttataaggttttttgccagaatgaattctttggtgtttgctgagggaaaacaaccgcccaaaggctttgccacattcaatacatttgtatcttttctctccagtgtggattctctggtgacttacaagatgtgaactatgcctgaataccttgccacattcatcacatttatatggtttctttcctgcatgaattatctgatgtgcagtgaggtttgagctccgtttaaaggttttgccacactcattacatttgtaaggtctgtctccagtatgaacagtctgatgaagtctaagatggacacgctgactaaaggaattcccacactgattgcatttgtaaggtttctctccggtatgaattctctgatgtctattgagtgtggagccctgattaaaggctttgccacattcatgacatttgtatggtttctctccagtatgaactcttcgatgccctacaagatgtgaatactgactgtagaccttgccgcattcattgcatttgtaaggtttctctccactatgaattctccgatgcactgtaagacgtgaacattgactgaagaccttgccacattctttgcatttgtaaggcttctctccagtatgaattctccgatgccttgcaaaagctgaacggtcactgaagaccttgccacattctttgcatttgtaaggtttctctccagtatgaattctccgatgcactgcaagacgtgaatgttgactgaagaccttgccacattcattgcatttgtaaggtttctctccagtatgaattctctgatgagctgcaagtcgtgaatgtatgctgaaaactttgccacattcattgcatttataagctttctcgccggtatgaattctccaatgcactgcaagatgtgaatgcttactgtacaccttgccacatttattgcatttgtaagttttctgtccagtatgaattctctgatgcactgcaagacttgaacgtttactgaagaccttgccacattcattgcatttgcaaggtttctctacagtgtgaattcgtcgatgcactgcaagacttgaacgtttactgaagaccttgccacattcattgcatttgtattgtttctctccactgtggattctccggtgacatacaagatttgatctatgtctgaatgccttgccacatacatcacatttatatggtttctttcctgcatggattacctgatgtacagtgaggtttgagctccgtttaaaggttttgccacactcattacatttgaagggtctctctccagtatgaactgtctgatgaagtctaagatggacacgctgactaaaggatttcccacacagattacatttgtaaggtttttcaccggtatgaattctctgatgaactgcaaggtgggaacttttactaaaggacttgccacattcattacatatgtagggtttctgtccagtgtgactcctttggtgtcttacaaaatatgaattttttctgaagatcttgccacatacatcacattgatatgatttccctcttgtatggactaccttgtgtacagttagtagtgaggcccgatgaaaggctttgccacactcattgcatttgtaaggtttctctgtagtatgtatcctctgatgattaataaggctggaagacgctttaaaggctttgccacattcattacatacatacgttttttccctaatgtgtggagaaactaaacaaccattattacctgtcttctccgtttcattacattcataaagtctcccttcagtttgaactttctgcagttcagccagacgtgactcaaagtttgatgtaagctggttttcaatatgattgttttctacatccccttgactatgttgatctcttttaccagtaagattgttttcatggggcactggcacttctttatcatttgtttcaccatctttccattgaaattcaaggtcatgtagatgtttctgtatttccctgaagtataaattttcaatatcatagctttgatgtctttccagtgccactgtttggaacctttctcctgtattactgttctctgttggtggtaattccttgatcacacatttaggagagatacctgcaaaatataatgaacatgagtttttttttaaactactactattgataaacaaacattttatattggaaacatacctacactaaacataatctttatactagacaggtgtgagagttctccaccatgatcttttatttttagaaatacaaaatgaatagaagtctatagtaaagaaagggtgactacatgtaattcaaattaagtttaggaaagcctagtttcaaacatcctatgaccaaaagacttatgttgtgcaaacatatattggcactaaaacaagtattttgcaaccaatgacaccaaattacgaaccgattggcagaaaatgtggctctctcataagagaataaaagttatatatatttacttcatatttactgtgtacaaacaaatgccaaaccacagcaagatatagtgtaatggtaaatattcacaagataaactaattaataatcatcatataaattaataaataaaacactctattaacccatgataaaaccagcaggtaagtaaaatacaatatacaatatacttagaattccatactataaatttgtatattgcatatacaagtttgcatcatatgcaaatacacaaatttatagtatggaattctaaacaaatctccctttataataagcaagaacatatattctagagacagcatatgataactagaaaatatgttgagatcactgacttttaaagataaaagaaagataaatatgtctatggccataccacctggaacacagctgatctcagaagctaaacagtgtcagatctggttactacttggatgggagaaaggtaaatacacaacataatacagaataaaaagtggggaaggaaaaatactgactatgatttcatgcctacacctatgtaacaatcaatagagcaactccctatctattgtcattttttcttgagacagagtctcactctgtcacctaggctggagtaaagtggcataatcttgcctcactgcaacctccactcctaagactcaagcgatcctcccacctcagcctctcaaatggctgagaccaaagatgttcaccaccacgcccacctaatttttttgtagttttggtagagacagagttttcctatgttgctcaggctgatctcgaactcctgaggtcaagcaacctgcctgctgcagcctcccaaagtgccgggattatatacaggcatgagtcaccacacctggtcctattcattgcctctaattacctagttaactggccacaaaatatatatcatcaagagatttctacttgaaaagcatatgaactaagataaaagacaacaaacactgtttggaagaaactacaaaatgaaaacttacagatacaatgaaggctgctttgatataaagacttaatgtctgccaaaattcctatgttgaggacccaatcctcaatgtgatagtatttggaggtgtggtctttgggaggcaattcggtcctctgccatgtcaggacacagaaagagaaagccatggtaaaccggaaaaagggcccatgccatgccaagaaccaaaatggctggttctgacatgttagacttctcaccacccagatctgtgaaaagggaatttctgttgtttcaaccacccaatctacaatatctactataggtagccatgctgactagggtaaagccaatatgctatctcattataaacataaaacaatgttgatatgctttatttaacaaagaaatctgtgagtctttactaaaaaacaatattctagactagctaacagcactaacttgtttaaaaagtcttgaggtaaattaccactatttaacacacaagcagttagtatgcccacgggattcatgtatctacatccaatttacaaagaaagtaagatatgcacctacgtttgcaggatcaaacattatgtttttttcaaaaactgcccaagcaggtactgcaggtaacaggtcaccccaaatactaagagtgtataaagaaatacttcaagagccatgctgtgttgccaaaagcattattcagccatccccatgaataacagtatctgagtcatcattccctgcacataatgatttagacagtgttctcagaaagtgatcaggccaaggcaggtggatcacaaggtcaggagttcaagaccagcccggccaagatgatgaaaccccacctctactaaaaatacaaaaattagctgggtgtgggggcaggtgtctgtaatcccagctacgtgggaggctgaggcagggaattgcttgaacccgggaggtggaggttacagtgagccgagatcacaccactgcactccagcctgagcgacaaagcaagactccatatgaaaaaaaaaaagaaaaaagaaaaaaaggaagtgatcaagtgaatgagtacggtcatcccttacagagtgagagtagtgtgggagatgaaggagttatgcaataatgggagtgtaaaacttatatgctagtaagtagccaggtattccgtctggaacaaagtactattttaggaaaggccagggaagagaaaaggcaagaggaaagggcaaggagtaatgtgcatggggcagcagggtttgtgcttgcagagctgtaggtatataatttcaccaggaacagttaaaatcctgactttggacaaaaaaagaaactaatttagaagtagcattatactggccaatatttaaatacgtgaattatactatgggcacaggacaagggaaaacagttaaaaaggaggcagtgtgaggatatgggaagaaagcagacttatgtctttataatatatgctatgaattttatcaaattgaatgtcccatgagttatatttccaggcatatgctcaacaaccctacatatcaagagatatgcgaaaaaatgttcctacaatataatcctgaagaaaaaatttgataacagccatgaagaggagatggatgaatttattttgtacacacacaaaaagacaacataaaaccttattgatagtacaacaatgttaaggagacttgggatgcagaagaagacacgctggcaaaatgggcaaatattaatctgaaaaaactaagaaagcaggaaattgttgtcaaggtttaaatacacgttcatggagacacagtatatatggaagtaatctgggatatcaaaaacataacatgggagcagacctgtaaaggagtcatttttctatgtgactgaagtcaaactgttaccagtttaaaacaggatgttataaatctaaagtgttttctgtaattgcaatggtaaccacaaagaatgtatagaagacacacacaatggaaataaaagtatgtcaagacaaaagaatcaactaaataaacacaaaggcagtaacggatatgaagaacaaaaaaatctaagagatataggaaacattcagcaaaacagcaagagtgagtccttctctatcagtaattacattaagtgtaagtggcttaaactccacaatcagaagatagagactggctgaatgaattttaaaaacaggctccaactacatactatccacaaaagattcatttttatttgaaggacacacgcaggctgaattgaaagggtgaaaaaagatatcccttataaatggtaatagaaagacatcggaggtggctaaactggtatcagtcaaaacagactttatgtcaaaactggtacaagagacaaagaagagcattatctaataattaaagggttaattcactagaagatataccaattatagttatatatgcacctaatattagagatccttaatatatgaagcaagagaaacataactaaagggagaaaagttccacagtaataataaaagacttcaacggaccacttttataaataggacagacagaaaaaaagtaagtaaataggcaacctaaactatacgttaaattggacctaacctacatatgcacaacgcatctcccaaaaacagcacgaaagaattttttcagaacttcacacagaacattcttcaaaagaaatatttaaaagtaaaactttttaacacttcttttttgttgaggctgagtctcgctctgttacccaagctggaaggcagtggcgtgatcttggttcactgcaacctccgcctcccaggttcaagcgattctcctgactcagcctcccgagtagctgggactacaggcgcacgccaccacgcccagctaatttttgtatttttagtagcgacgcggtttcgccatgttggccaggctggtctcaaactcctgacctcgtttaacacattttaaagactgaaatcataaagtgtaacttatcccttcataataaaataaaactagagatcaacagcagaaaaaaaattagaatatcaaaaaatatgtggaaacaacatattcctaaacagccaatatgtcaaattggaaatctcaagggaaatgataaaatatctcaaaacaaaggaaaatgaaaatagaacatgccaaaacttatgtatgcacagaaaacagtgctaagatagaaaactgttagatataaatgcttctgttaaaatagaagatctccaatagaacagaatagggaacccagaaatacagccacagatctccaatggaatggaataggaaacccagaaacacagccacatacctacaaccaactgatctttgacaaagtcaacaaaaacaattgagataagacattctattcaataaagggtgctggaaaaactggctagccatatatagaagaatgaaactggacccctatctctcatcatatacaaaaattaattcaagatggatatagacttaaatgtaagacctcaggctacaaaaatcctagaagaaaacttaggaaaaacacttctggataaaatataattttttaaaaaaaatttattcctcattccctaagcatgacgggaaaaaatatataggttttataaacatcagttgagaagtccttgaagtgcaagaaatgggctacatgtataataaagtaagatttgaaaataataattcagtataacatgatggacttgaaagcagacaggagaataattattataatatagcacttgttccaaaaaaaaaaaaaagtgtgatttaaagaaaatccagcaagttatatttaggaaactgaaacttactacagaaaagcaatgtgtctgatataacaagtatgaccaggccgggcgcagtggctcacgtctgtaatcccagcactttgggaggccgagactggcagatcacctgaggtcgggagttcaagatcagcctgaccaatatggagaaaccccatctctactaaaaatacaaaattagccaggtgtggtggcacatgcctgtaatcccagctactcaggaggctgaggcaggagaatcgcttgaacctgggagacggaggttgcagtgaggtgagatcgcgccattattctccagcctgggcaacaagaatgaaaatccgtctcaaaaaacagaacaaaacaaacaaacaaaaacaaagtatgaccaatctctttcatggtatttctacaatgaagatagtaactatattaaaaaaatatattcaaggtattaaaaaatttccaatgagaagaactgtaatcaattccattaacaattttttttttttttttgagatggagtctcgctctgtcaccaggctggagtgcagtggcgcaatctctgctcactgcaagctccgcctcccgggttcatgccattctcctgcctctgcctcctgagtagctgggactacaggcgcccaccgccacaccctgctaattttttgtatttttagtagagacgggttttcaccgtgttagccaggatggtctcgatctcctgacctcgtgatccacccgcctcggcctcccaaagtgctgggattataggcgtgagccaccgtgcccggtctcattaacaaatttaatagtaggaattaagtcaggagaaatgggagtaaaagaaataactgaaactgtcttattacaacactattgagtttgtgtaagttttagagaaactgctcctgagctataccatctgtactaaagaaagaaatcttgtaaaatatataaaatgatatacattccccaatacaacactacctcaaaaagaaacataaaacaaagaaaactgagtatcctcaaaaatatggaactgattattaaataaataaaaacaaagttcatttacaatacatgaaaatgcaccagattaaagtagcggtcacttaaaacaaattatgtggacttaaaaaatataagctttggccgggcgtggtggctcacacctgtaatcccagcactttgggaggctgaggcgggtggatcacagggtcagggataggccaagcgtactggctcaagcctataatatcagcactctggggtgccaagaccagagaattccttgagcccatgagttcaagagcagcctgagtgacatagtaaaaccctgtctctacacgggcatggtggcacgcacgcataattccagctacttgggaggctgagggtggaggattgcttgagcccaggagacagagattgcagtgagctgtgatcacaccactgcactccagcctgggcaacagagcaagaacctgttttaaacaaacaaaaaagcacatggacagaaaacagggaattggatattttaactctgccataaagttctctgcgaacttcagctctggaaccaccactgatgtacaaagaaggcagcagaatatatatacaaaggtgacagtgaaaggccagatgcagcattgtgaagctttttatttttgaaccaataaggcttcagtctcaaataacggaggggttcccaagaaagacaacagaggaaatacaaaaatgcacaagggcgaatctgaacttctagaaggaaattatactcacctaggaagaccaggttcctatagttctccaacatcacatccttgtacaaagctttctgcacaggctccaggcatttccactcctcctgagagaattctatggctacatccttgaatgtcaaatgcccctgaaatgaaaaacacatttcaaaaagaagcaatatgagagctcttctgtttacacaaaatgaggagagaactatcacatcactttgaagtgtgtgttttgacatatctatatggcatctgtgagaaagttattggtccctaattttagtttgttataaaatacaataggagactattatattctctacatcagtgtatagttctatttttgtggacaatacaagaaatacacaaataagaaaaacacatggttatcccttaaaaagtgttagatattatgctccatacatcaactgtgtctaggtgagctagtatatgagtggtgttttcagagatgacaatgtctacagcggctttaaaggtcagaaactaaaaactgtgatgaccagagcaacagcaatgactgaagttttggaacactccccacgtgctgggcattattccaaatgctttacatgttctaattcaaataacaacatgatagcctatgagagagagacttgttccatgttactgtgtcacagacacgctaacaaacttgcctaggtcaacaacctgaaaatggcagagcaagcatctgaacccagatgtctgagaattagagttgaatcaaaacaatcaaacagttacattatggttacagaatatcctagtctgtctgtgctgctataaccaaataagacagactgggtaatttatgaacaataaaaatatatttctcataattctgcaggctgggaaatccaagatcaaggtgccagaaggactgatgtctgctgagggatgatccctgcttccaagatggtgtcttgttgcattttctggaggggaggaatgctgtgtccccacgtggcagaaggaacagaagggccaaaaagcagtgaactccgtaggataagcgttttgatatctcactgaccagaacaccatatcccattgataagggcagacccctcaggatccaatcacctactaaaacccaaacctcataatacttggagattgggcattggagattaagtttcaaatgaattgtggaggagagaaaaacactcagaccacagcattccatcttgccccaccaaaattcatgtactcctcacatataaaatgcattccatcccaatggccccccaaagtcttaactttttctactaccaattcaaaagtctatagtctacagctgcatctaactataatctaaatcagatatgggtgagactcaaaaatgtgtttcatcctgaggcaaactgctctccagctgtgaacgtgtgaaatcaaacgacttaagtgcttccaacatccaacggtggcgtagacacaggctaaatatttcaactccaaaatgcagaaacaggaaagaagaggtagccactcccatgttaagtctgaaactcaaatagggcacacatattaaatcttaaggcttgacaataatcttctttgactctatgtcccaccttctagacatcctggagtaggagttaggtccccagtgtcctggggatccctgccccattagttttgttgggatcacccacatggaacttctcacaggctgtggtttcccgagctgggatcacatactggtgactctacagttctggggtctcaggcgtggtcctgcttccagggctccccttgaccttgccctaataagcactctctaaggtgtccctgcctccatggctaggctgagaattgccttagtggtgacctcctgtggtagcactgaaaggaacaggatgaaaggttaggggccactgagcaaaaagataactgacgtaaaccggtgtctgcaataacacagaaagacatgagggtgaagatctagtaccacagatatctgcagtaccagagtctatccacaatagtacagaaaataggggagcttctgagtagaaagcagcaaacctcttcaatagggagatgacaagcaaaggcccagagaaaaagcatgggaagtctccagaatctagggtagttgattggaatgtcctccctgaacaaagcagccaccaaatctgggcaggcagctgattttttcaaatgctgaagtcacaaaagaagacaataaaacatacaaagaaacagggaaatacggtctacaaaaagaaaccaactgaatctgtacaaacctacatgaaagaaatggcaatttacatcttggctttgaagaattaaaaagaaatgtgggccgggcatgattgctcacaactgtaatcccaggactttcagaacgccaggcaggaagatcacttcagagcaggaattcgagaccagcctggccaacattatgaaaccccatctctactaaaaatacaaaaattagccaggcatggtggcacatgcctgtaatctgaggctgaggcatgagaattgcttgaacaggaggcagaggttgcagtgagctgagatcccacccctgcactccagcctcggcaatagagtgtgactctgtctccaaaaataaagaaaatgcgaaggtaggcagatcacctgaggtcaggagtttaagaccagcctggccaacacggtgaaaccccgtctctactaaaaatacaaaaattagccaggtgtggtggcacgtgcctgtagtcccagctactcagggagactgaggcaggacaattgcccgaacccaggaggcagaggttgcagtgagtcgagatcatgccactgcactccagcctgggcgacagagcgagactccatctcaaaaaataaataataaataattaaataaaataaagaaaatgaagagagtctaatgggcccatgaaaaaccatcaagcaccaagaacatatgcattctgggagtccaacaaataatgtgaatatatctaacattactgaactttacataagcaaacaagctttaatgaaagacataataaagatattatcaaagactgacaaactcgattctttttggaagacatggtgacataaaggcctgcaactgaaaaaattcagagccatgaaaacacaaacaaaatatgtgggaattttttttttttttagaagacagagtctcactgtcacccaggcaggagtgcagtggcacgatctcagctcactgcaacctccacctcccaagttcaagggattctcctgcctcggcctcccaggtagctaagattaaagacgtgcaccatcatgtccggctaatatttgtattttcagtagagacagggtttcaccatgttggccaggctggtcttgaactcctgacctcaggtgatccacccaccttggcctcccaaagtgcctggattacaggtgtgagccaccacacccggccaatatgtggaatttaaataatatgtggctgtgttgtgtaaaaggagaaccataataattttggaaagaaaatggaggggtttgccaatctacttgtgaacctattatgttatttataatctaaaactttataatcaaatataatctacaacaagatatacagaaaaattcaaattaaagattcaagcaaataaaatgtaagcaacaaaatattagatcttaaaaaaacacagtattttataatcacacagcgagccaggccttccaaagaaagatcagttatttatttttgcttttgtggtatagcgtcctaacagaagcaaccactctttaaactgtccaacctgaaggaaccctcaaacacctgtggtgaagagagcattgtggcagccatggtgaaaaattataaaagatccatatgtcttcatttagagattgttccaaagaggatgcaaaacaagctattactgcttattaacaaaaaaagatgtatctttgaaaaactggcacaatgaaatttcacaacagaacatgtactgaagaattgttttctaaaatctcataatgacacgtaaatgcatcttgacacctctcactgactcttgccacagaacttacaactgtagctccccacggaaacatgagggatgatggagaaagtgacagggaaaagaaacccgggttcctccaggttgggtaactgaaagagtgattgcctctttaggatggtgcatttcctattttcctggatctggcaagatttcccactaccctaaggtgcaatggtgtcctcatacaccaacgacacatattgggtggatttcccacccaataaaaaaaaaaaaaaaaaacttactactatgttctgtttacattttgaggctatggggaaaatgaaaacccttcgtatttccattttccaattccttggactgtgaggaggtttcattattttgtggaaatcaaaccaaaataattttcattctttgctcagttttcctttactgcattctaggagccatttcatattctgtagttaaatttttaaaatatatatgccttgatgtccttttcttaggttataaatttctttctgtgtaaaactaaagctgggcacggtggctcatgcctgtaatcccagcattttgggaggccaaagcgggtggatcacctgaggccggaagtttgagaccagcctgaccaacatagagaaactctgtctctactaaaaatacaaaattagccaggcacggtggtgcatgcctgtggtcccagctactcaagaggcttaggcagaagaatcgcttgaacctgggaggcggaggctgcagtgagccaagattgcgccattgcactccagcctgggcaacaagacgaaactccgtctcaaaaaaaaaaaaaaaagctaaaatgtttccttgatgcccatttttgtttgctgataaattacattgtgtatatttaaggtatacaacatggtattatggtatggatagtaaaaaaaaaagtcattagagtttaacaaattaacacacccatcatctcacagttactttttttttttttccctctgttttggccagaacagctaaaatctcatttagcatgaatttcatatataataaaacattatttacaggctgggtgtggtggttcacactgtaatcccagcactttgggaggctgaggcaggcggatcatctgagatcaggagttcgagaccagcctggccaacatgatgaaaccccccaccatctccactaaaaatacaaaaatgagccaggcgtggtggtgcacgcctgtaatcccagctattgggaggctgaggcaagagaaaatcggttgaacccgggagacagaggttgcagtgagtcgagatcacgccattgtagtccggcctgggtgacaagagcgagactccgtacaaaacaaaaagcaaaaaacaaaacaaaattatttcctatcatcctcgtgttgtattaacttcttaatgcctaaactgcatctctgcttgaaattttaccaaaaaaacaaatatatacatcatgtgatgtttaaaataaatataatatttaataataattggtgcagtgagagaatttggctccatcttctctgataacaaatgttcagctcttacatctgagcaaaattataaccttaaaacttaaaacaactgctggtaagagtccccgcaggaacaccgcagtctctgtgagatggatattctgaccatggctagaatctgacattcaggttgatttcatatttttaaatcaatgatggaataaaacacgctctaatgtctgtatctagttttccattcaattccctgtcattaaggcagttagaaatagtgactcattcatacagcttcaaatgtagtataaaatcaggcagaaagatctccccttacacgcctccttttccatattttttttttttttgaggatgaagtcttgctctgtcacccaggctggggtgcagtggcaccatcttggctcactgcaacctccacctccgggttcaagctattctcccgcctcagcctcctgagtagctgggattacaggcccctgccaccatgactggctaatttttgtattttcagtaaagacgaggtttcaccatgttggctcaaactcctgagctcaagtgatccgcccacctcagcctcctaaagtgctgagattacaggcatgagacacggcgcctggcccctttcgataatttactaggtatttatgcacattaatatgtgacttccacatgcagcttctctattcctggtctacagaaagctgacagtgcatccagatgtggcccctaaacaatccctgctgcccaacagctctgataccacgggaccctcaccccatctccatccatgtctgggtgtgagcccttcccaggaccatgcccagtgcagcctcttcccaagttcatgtcactggatcatggtgagatggaatctaaataagatgagaggaactgaggaaaagcatggatgagcatgagcaaatgtgtcaggaaggacacttcagactcagagaagatttgcaactccgacgccctgtacttcacaaaggaaggagacagaatgacccaccaagaatatcacttcacttgagtaaagtatcactctacctgagtagccatcactgactccttttccttcctcttcttcctcttctgggtttctttctcagtcaatgtaattattcacacatcaaacctgaaagttaaaaaatctgttgtttaatgcttggaaacaacacattcctttctgtgtcacaaccatgcacacagggaagaactcagcctgtggagagacagcccactgcaccaggggggatgcaagaataataaattcctacacaaagaccaagtgaatctttcaccgttttcttcagcattagctcccctctgggagaagcccacacacaggctgcagcagtgtgtagctaggctggactgagctcccattcagggcacggacctatccctgatcaaaccccatgcagcgcacagccccccgtcacctctgtgggtcacaggctgagctctgccctcggaaatgggggacacagaggctggaagctcaatgctggatacaaatgagaatcaacttggggctgggagcggtggctcatgcctgtaatcccagcactttgggaggtcgaggcgggtggatacctgaggtcaggaattcgagaccagcctggccaacatggtgaaacaccctctctaccaaaaacacaaaaattagccaggcatggtggcacaccccttaaatcccagttacttgggaggctgaggcaggagaatcacttgaacctgggaggcggaggttgcagtgagccaagatcaagccactgcactccagcctgggcgacagagactctgtcaccaaaaaaaaaaaaaaaaaaaaaaaaaatcaacttgggtacctaaaacattacggaggctgggccccaccctaactactggaaggagaatctctataagggggaatgaaccatgtgttacaaatgccttggcactctagtgtgaagcgagggttgagtagtctcaaagggggcaagactaccacagccccagtctcccagctctgacctccccttggggccttgctgtcaccagtctgtagaaagtggaaggcaaagggccagaaagaaacacacagagcagaaaatatggacctgcctttattggcttttatttgcaatcctagaatcagacaacacctcattcttaaaatgaaaggagtgttctgtgagctaaggggaggaggttggcttcataagctgaaaggggctgaatggagcaaaatcaggaaactaaaagcatgttggttgtttcaaagttacttttctttgggttgccattttccccagatcctcaaaatgtaaaaacaacatagtagtaagttttgtttaaatgagtgggaagtctcatgtgatgctggtgggagagggcacctttgcagctcgggatgggggaaatcttgccagattacctgcaactgaggggccagagagttctaggcacagggacagcccaggtagacaccctcggctccaggaataggaaagaggcctgtgtggctggagcagagggagtgaggaggacacaggtaggaaatgaggtcagagaggtcccgaggcagcagatcaggtagggacgaggtcttcaaacatttttctcccacagctcacagcacttttagaaactatgcatttccctaccattttaggtaaatgtaacttttctttatcatttgaattaaaacccttctatataatgtcatatcttctctatttcaaatatatcctgacatgtaaagctagagccaggaagtatagggccaccgtcatctgagatgtgcaggagcgcaggggaatgtacttagggagtttaggaagtcactttagacacataaaggtggagacgtctcttagacggctgaacagacaacagaggagacaacaggacacagaattctagagttcaggggacaggcctgcaggggacatggagacgtgtaggtgagtaggtgggtgatatggatcagctctgtgtccctggcccaaatctcacactgaattgtaatccccaccgttactggtggggcctggtgggaggtggatggatcatgggggtggatttgtgatgaatggtttcgcaccaccccttggtgctgttctttatcacagtgagttctcacgacatctggttgtttagaagtgtgtagcgcctcccccctcactctctcttgctcctgctcccgccacgtgagacgcctgttcctacttcgcctgctaccatgtttggaatcttcctacaggctccccagaagcagatgttgccatgcttcctgtgcagcctgcagaactgtgagccaattaaacctgttttctttataaattactcggtctctggaattttgttgtagcaattccagaatggactaatacagtggggtttaaagccatgagatgagatgatgaggaaagacagtaggtgtggacagagataagaagaggttcaaggactaagccatgagtctttcccacattgagaaacattcgaagtccggacacagcagcagaggaaaatggtcagggaggtgacaagaaaattaaacagaaagctcctgacaggaaaagaaagactaaagcaggaaaagaaatacattggatttagaaatggggaggtcactggtgactctgaaaaataaagttatcagtggaatggtggatatgcaagtttgactggatgcattcaagagggaatgggaggcaagaagtgaagacggagagtataaataagatttcagcacagaagaggggtactcatacgggcagaaatgtagttagtagtatgttttgtttcaattagggcagagtggaaggaaacgataagctttagggtctgtgtgtgtgcatgcatttaatgggcaataccaccatcagtaaacaatgtttaaaataattccctagaggtaaaaatagacgttgcagttgttacactttataataggccaattttttttctctttttaacttatattttaagttcaggggtacacgtgcaggaggtgcagcctggttcacaggtaaacgggtcatgggggtttgttgtatacattatttcatcacctgggtttttgtgtgtgtgtgtgagacagagtctcgctctgtcgcctaggctggagtgcaatggcacgatctcggctcactgcaacctccgcctcccgggttcaagcaattctcctgcctcagcctcctgctgggactacaggcatgtgccaccacacctggctcattttgtatttttagaagagccggggtttcactgtattggtcaggctggttgcgaactccagacctcaggtgatccgcccgcctcggcctctcaaagtgctaggattacaggtgtgagccaccacgtctggccccatcacccgggtattaagcctaatgtctattagttatttttcctgatcctctccctcctcccaccctccaccctgaggtaggccccagtgtgtgttgttgccctctacgtatccatgttttctcatcatttacctcccacttatgagtgagaatacgcagtatttggttttctgtccctgtgttagtttgccaaggataatcgcctccagctccacccatgtcctggccaagcgcattattttgttcatttttatggaaaggccgttgttttgtacgagcctcccgcactaccagaccaagccagaatgaagtctctcatgctaaacgccacattagcaaactgacccttgaaataagtcacgtttaggaaaaaagaaaattccaaaaaagaaaacaagaacaggagttaaaaaatgaatttgtaataatttccctccttatcacgacatcgtaacaaggtttgagggaagcacatctcacatgagtgtgaaaacccaatcatcacatttattaactacaaaaggatcgaatttgttgtgattttgtccttcaacaataagaaactggtaaatgtgtttctctaagttcggtgagccatcctagcaaattaatcaaacctttggctggggtagtaggaatgccaatttggagtcagtaggtcagaagtataggtgacaacctactactttcgaaatggtagctgaagtgagccggggaggtcttgtgagactgagccctttacctgtgggcaacctgtgggagatgactctaactccaggtagacagtgccagaattaaattgaattctaaggcaatctagctgttgtctgctggagaattttttagtgtgtaggagaaaactccccaacactggccacagaagagttctgtgttaagtgtgagagtagaaaggaaaaaatttgttttttcctttacaccctgcaattactaggcctgtcattctccaaagagcattacccatcctctccccaaactgcctccccagcacctagtggaccctcttgcctggagaaaatatccctgttccacactgagtttaaagcattttgcctcgtagctccctgtgattgttgcagcagacagaggtggggggaaagtaatcaccactgtcctggcagcgagaaagtaacagctgtatcttccgaggacagtcccagttgaaatctttgtgctgcaggtcgttgtgatatcatattctctgattctttgaaaaatcttccctaagccaccatcctgccatagacccaccacagaaaaccctccctaacgaaagccttttgtcactagagtttgaggccctaacgttcccctcctaaactgagacaggtttacaaacttccttggggtccacacccttcccagatactccatagtgctccccatatcgtgctacgaaatcccacatgccccaacaactcataaactcctgctgacctaatacacacaaagatacctgaggactcaatgacccaagacactcgattccattcataatgaccccacccttgaacactggcaccaccatctactaaaacagatgtctccaatgatgcacataccccagtgagacccaacatcttccaaggaaactctccatattgacatttagatagtccaaaatgcatctataaccatcttaacttgccgcccaaaatactccaaaataacaaatgtagcccccaaagtgatggaccccacagaagtcactatggagagtgcctgctgtgctgcagctctgggttccatgccctcaggaccaatgcaccaccactccagctgcccactctccccgtgggctcagcttaggacttgctcctcaattcagctgacccttgaacaatacagctttggattgtgtggctcctttcaataaaattttcctcaataaacatcctgaagaatattttggagatttgcagtattttgttggctgtacaacaagaaggcctggacaatgagaagttgttccttaagtcaggaagggaatgccttttaaagttctttgatgttgggccgggcacagtggctcatgcctgtaatcctagcatgttgagaggccgaggcaggcagatctcttgaggccaggagttcaagatcagcctggccaacacagtgaaaccccatctctactaaaaacacaaaaaattagctgggcatggtgggacatgcctgtaatctcagctacttgtgaggctgaggcatgagactcgctagaacccaggaggcagatgttgtagtgagccgagatggcgcccctgcactccagtctaggcagcagagtaagactttgtctcaaaaaaaaaaaaagcgggggggggacagggggcaaaggacctgaacattttgcaaataagacatacaaatgccaggcacggtggctcacgcttgtaatcctagcactttgggaagccgaggcgggcagatcacctgtggtcaggagttcaagaccagcctgaccaacatggtgaaacccccgtctctactaaaatacaaaaattagccaggcatagtggcaggtgcctgtaatctcaggtgcttcggaggatgaggtcgcagtgagctgagatcacgccattgcactccagcctgggcaacaagagtgagactctgtctcaaaaaaaaacatacaaatgaccaacaggtatatgaaaaggtactcaagatcgctaatcatcagggatatacaaatcaaaaccaccataagctgtcacctcatacctcttaggaaggctattatcaaataggcaagagaggtgttagcaatgatatggagaaaaatgagcccttgtacactgctgctgggagtgcacatcagtacagccattatgaaaaacactatggatgttcttcaaaatattcaaaatagaacaacaatgcaatccagcaatctcatttctgggtataaatccaaaggcaatccaatcagtatgtttaagagacatctaggccaggtgtggtagttcatgcctataatcccagcactctgagaagctgagatgggaagatcgcttgagaccaggagttagagaccagcttggacaaaacagcgggaccatgtctctacttaaaaaaacaaaaaacaaaaaacttaggaacttctgccccctcatgatcactgcagtattattcacaacggccaagatatagaaacaaccaaagtgcccatccaggaatgaatatgtaaagaaaatgtgtgtgtatatatatttatgtatgtgtatatatatatatatatatatacagagtgtgtgtgtgtatatttatataatggaatattattcaaccataaaaaagaaaatcctgccgggcacagtggctcacgcctgtaatcccagcactttgggaggccgaggcgggtggatcatgaggtcaggagattgagaccatcctggctaacacagtgaaaccccgtctgtactaaaaaaaaaatacaaaaaattagccgggcgtggtggcgggtgcctatagtcccagctactcaagaggctgaggcaggagaatggtgtgaacccgggaggcggagcttgcagtgagccgagatcacaccactgcactctagcctgggcgacagagcgagcgagactctgtctcaaaaataaaaaataaaaataaaaataaataaaatcctgctatttccaacaacatggatgaatctggaggacattatgctgggcgatataagactgacacacaaagacaactactgtatgttctcacaagtagaatctaaaaaagtccaattcatagtaataaggcggaacagttgttaccacaggatgctgggtggggaaagtggagaaatgttggtcaaagggtacaaattctcagttataaaatgaagaagttctgaggaatctaatgtacttcgtggtgagtttaccgcactggacgctttaacagtttggaaagtttttgaaaaatctaataaattatggggtaaaagttaaaaaaaggcaatattgagaaattaatgacatcagctgattacaggatgacatcaaatcttatttcagaagttagtaattatagaagaaactgaataaactaaaatttaaatcaagcttccaaaataacaatgaattaactgtaaagcaactacaaggaaaaaagtaaatccattaacaaaacaaaaaaccaacactctcaactctccttcaaagacatacattgtaggcctgtagaggtggttcacacatgtaatcccagcaccttcaggggctgaggaggatggagtgcagctgagaggctgcagtgagccgatataattttaccgcactccagcctgggcgacagagaccctgtctcaaaaagagaaaaaacaaacaaaaaaccaaagatacatcttgtagtgacagtcagtcatttcttgcctatttctctcctcctccatcctctactccctccctggaaagaagagttacaaaatgactgaatcaagtcactgccctgtggctaaatagggattccaaatatcttttgatataaacaaatacaaaatgcacaagccttgtagaaaagagtggtaattttcatcctcatgagtacaatttaaagaaacaaattttaaattagagtataaagtcacaaatcaatacattaaaaccaccatccatatccaatcaactcacagctcatctgggtggggtcctcgcccactctcttcactactatgtgtttcccgctctcattctgcacgtcttttttccctttgctgtttttctcccctttctttattccctcttttatgtctattctgcccaatgcttcgaaatttatttcacctcttgttgctctttctccccaaactttcccattgtccccagccgccacgtattcctgcctcttttcccccatctgagctccctgtctgctctccctgttaaaatccctcttccctgttaaattcccttttccctgttacatctcctttgttcccactctctagcacccccaacttcctaggcttcctccttgctgtggttctccctctactctcctttgttacccactcccctctccttcagtcccagcaccacgtggctctgtcagccgcggctccgactcttaccttttccgccccccgcgtctgactgcagtgcctcctcctttgccgcccctctctattttgctgcccttcagctccctgaagctctcccttttccctaatttctttatgtgcttttctccccgtgctactttctccatgcgtcctcttgcactcttgctctctttgccagtacctaaattatcatccattttgccgtgtactcattcttttctccccagtttttctttctgtcccgtcgctccccctcttttcctctcctgatccctctcacccacacattcaggaggaaaggggaggaatacgatgcccacctcccggaagagcacattttccagtggagtaaaaatttgggaaggaacgacagtgggtgtcacaagacagactcgggtgacctcctgcaacgcggagtcaggaaaagcagtggctgtgaaggggcagcctggggaggggaaggacccggcgtgaggaggacactaggtggcgcgcggaggacactaggtggcgcgggggacggtgtctcaggacagggagggtctgcagaatcccaggacctgggagaagaagcggctccttcaggagctgggcagcgggcgctcccctccaggcgtcgacaagggcgaagctcgggggtctcgactggtgggaatccacctcgcgagggaggacttgacttcgcccggggccgaagcaggggtcaatgagagttttaagcaggaacacgacctgaatggggttatcgacatggttatctacatggcagaaaggcagggggcaaggaacagcctgagagagattttaaaccgacagggaagcaattctcggacttacgtggggagaagtgcctgttgcaggggcgaaggggctatgggtattttaaggtccgtagcgatccccagatcactggtacggagaagtgaggactgcaaagtgcacgtttaatccaggcagacggagcgaagtaatgtttaatccacgtagactgaaacacacacacagcgataaggcctttccctggcgcaatctgcttccgggagtgacggaaactgctagcggagagaaaaaactgggaggccagggggcggggcctgggcgagccgcgaccagcaaggggcgggtcggaaagaggggcctgactcggggagggaccctgagagggtggagccgggccggagcggcagtgggcgtggctaggtggggcgggacggagccgcggcggaggatggggcggggtttcatggggtaagcggggccgaaatagagcctgttatttactctggttcacaggcagcatgtctttggttttctgactacttcttgtcctgtgaagcagcgttgctgcctgcctattttaagttaatgtttcaaaatttaaggttaaagcttaaagttgtggtccacttatattagaaactaagatgatttcttaacaagttgaactaagtcaaaaccgatttttacaagcttggtggactccatccactcttgccgatgatgctgaagctactcaatagtcagggaactaggatctcgctggggatttgatgtggagccgtggctggatccaggaacccggaagacattatgccaagcgaaatatgctagacacagaaagacaaatactgcctgtgcttttacacgtgcaaagtacaaacgtcaaatttacagtaacagattagaagggtggttaccagggctgggggatgtatcctatgcctttatcaccattatattttggaagcagataacttctctggcctcacagattcacagctgggcagaaattttgcctcaggatgaatcacaccttgattctcacccatgtgtggttcagataatatttagggggtattctgccctaagagctgatacaggaatggattaagacttttgagagttgatactgaaatggattaagtcttttgagatgggccagcagttttggaggcccaggtgggcaggtcacttgagctcaagagttcaaaaccagcctggacagcatcgtgagacccccatctctacaagaaatacaaaaagtagccaggcttggtaatgcactcttgtagtcccagctacttgggaagctgaggtgtcagaattgcttgaggccagggatttgagatcatcctgggcaacatagccagacctctctacaaaaaattaaattatctggacatggtggcctgcacgtgtgggcccagcaactcggaagggtaaggaaggaggatcatttgagcccaggaggtgaaggctgcagtgagccatgagaagaggagatttggttgggtgcagtggctaacgcctataatccccacactttgggaggccaaggtagcagggagctaacttgcattcttctgttagctgaggcgtttgatgataaatgaaagcagaaagtttgtgacttatttacgttctttccacagaaaggccatatgtccttggccataaagaaaaagagacctacagcttatctgcttcctctatttttttttatatgttctggaccatgaagaaagatttatagcttatttgctttatctctttgctttctcctggtcctttcaggctgactccttttccccaattagggctccacagactctaccctcaaagggcatttttttctcaccctcctataaaatccctcccacaaataaaccaggatcctatttcccagcatgaaaagtttgttggaaaaaaaactgaggctgcatgggaccttctttctcttcttcaaaactacttcacctcttctctcttttgtctctctcttcctaactgccctgcacaattctaggtccccagtgaatccttgggttgacatgcaagggaagaacccatagggaaaggaaatctctggctttcagagataactttttggatatctggatgcattcataaccatccttgtgttaccagaaaggggtcctgatccagaacctgaaacttccattgcacaattataactgagaaaattattacagtgaaagagatctgacctaatcaactccatcttgcttttaacctccaagctgctcttgttcattcctgggcataggctgaactaactttggaaggaacttagtttatagtttgaaacaaagacattaacagccctttcccaaaacaaacccccttcctgcttggggactagactgcctttgtaagactaacaaattaggcacaaggtgagagatgatggtttaggagtcatgtagctggaggctacaagattctcacccttcccagattgttcctggggataacattactattataaaacctaagatcagtgcttgagatattttgcattccctgcacttgatggatcacctgacaccaacccagatccataaactggctcatctggtcttgtgaccccacccaggaactgactcagtgcaaaatgacagcttcagatctctatgatttcgtctcctacccaaccaatcagcactcccgactcactgacacctacctatcaaattatccttaaaaaccctgatccccgagttttcagggagactcatgtgagtaataaaaaaatttcaggttcctgtacagccagctccacatgaattaaactctctcttgcaattcccctgtcttgatgaatcagctctgtctaggcagcagggaaggagaacctgttgggcagttacaaccaaaagggagggttcttggatctcatgcaagaaagaattaggggtgagttcacactgtaaagtgaaagcaagtttactaagcaagtaaaggaacaaggcagggtgcagtggctcacgcctgtaatcccagcacattgagagaggctgaggtgggcagattgcttgaacccaggagttcaagagcaacctgggcaacattacaaaactctatctctacaaaaaatacaaaaattagccaagggtaatggtgtgcaccagtagtccaagctagttggaaggctgaggttggaaattgcttgagcctgggagaatttttttttttgaggcagtgtctggctccggtcacccaagcagtagtgcagtaatgccatctcggctcagactctaattcaacacggaatgttgagcttctgagcgtgatatagcggaagtgccttctcttccggtctctctggtcttggccgcagaagccagatgacgaagggaacgtcattgtttggaaagcgtcgcaataagacgcacacgttgtgttgccgccgtggctctaaggcctaccaccttcagaagtcgacctgtggcaaatgtggctacgctgccaagcgcaagagaaagtataactggagtgccaaggctaaaagacaaaataccaccggaactggtggaatgaggcacctaaaaattgtataccacagattcaggcatggattctatgaaggaacaatacttaaacccaagagggcagctgttgcagcatccagttcatcttaagaatgtctatgattagtcatgcaataaatgttctggttttaaaaaatacaaaaaaaaatactgaatgtttactcctgaaacttatgatgcctaggttgagaaagactcaattttcctcatgctaaatactttatacatgtcctttattcatgcatacataggacactttacacaatataattgttgaaagtgcttctgaaatactgttcaaattgtctataatatttttacacatgcactataaaaattaaatttatcagacaataaatattaaataatttaataaaattgcatttttcaaaggctctaacaatgcatatttgagttatcatattaaacattgtattctatgatttttcaactgtaatataattttttttgagatgggatcttgctctcttgcccaggctgcagtgtggtggtgcaatcacggctcatgcagcctccacctccccaggctcaagtgatcctctcacctcagtttttgtgtttttagtagagatggggttttataatgttgcctaggccggtctcaaacttctgggctcaatctgtccacctcagcctcccaaagtgctaggaatacaggcatgagccacagagcccagccaaaactacattttaaaaataattttttatcattacacactccactagaaaccatttaacccaatttatggacttacatttcttccattgaagaacttgaaggatccaaaaatcgaggtgacattctcagatttgtgtggcaaaaaaagaatagaaaaataacagatgcaaagaatgtgttccaccaatatgtggaggatcccttttattttaagttcagggaaagcattggaatgatacaagaaaataaactgaaattgtataatgtggaaacaagagctctgttgctaatatgcaagtttatcactgagattttaacaacacaacatgctaattataccttaaaatatgtttctcccagtctgggcaacatggcgaaaccccatctctacaaaaaaatccaaaaattagctaggtatgctggtgtgcacctgtagtcccagctacttgggaggctgagagaagaggatcacctgagtccaggaggtggaggttgcagtgagctgagatcgcaccactgcactccagcctgggtgactgagcgagaccctgtctcgaaatattacaatatgtgacagcgcagcttccatcagaaataatttgttcctcttttgcccacacaaaatattcacctccacttcctctaacatttttttttaaaaaaaaaagcccaaacataactttcagttgcaagcaaggatctcatgacagtctcatgacacttctgttcactgagagcccaatagagtcctcgtcactcacgacatttcatggtggaacagaaaaataaaacctgaattaaccctcacattcagaaaagggaaacaaagaaggtactacccagtaggtccatagcaaatgtgcaattttgctgagaagatgagttagggcctggttccaggaggtcaggaatgaataacagtacttttcatggctacagttctcctgagaataggtttccagtccactatattttgtcgttcttaacttcacccgatgacatccctcatgcagtatcagaaagtatgccctccttctgcagtaagcatctttccccagctacttcttttccacttcaatgtaccatcccaaagactattataagtctaaatttaattttgtttttataaaatactatggactgatagaagtctcaaaagtataacattatgaaaagtataacaaaagatagcattttatctgatgccatttcaaaatagagacattttcaaagctaaacccatgactttagctatacccacgagttttaggaacccttccttagtttcagaattttattccagtgcttttgaacttcttgggccacagtctagtttctatttactacacttgccatttcatccactctcaaaaaacaatttcacaagagttaccttaatcaactggcaggttatttcaaagaacgttagggctatggccttgacttggactttgttataattttaacttgctgttgcccctcaaaccacttctcaaatgtgagttttatcagttgcagatgagctactgctgcagacttaaacattgcttgaaaatcagctaactcatttttgaagaatttacaaaatattgtgtcaagtgcagttgaaagccatatggcacattagcaccttctgctttctttttgtttgttttgttttgttttgagatgaagtctcactctgtcacccaggctggagtgcagtggcatgatctcagctcactgcaacctccacctcttggtttcaagcaattctctgcctcagcttcctgaatagctgggattgcaggtgcctgccaccacgcctggctaatttttttgtatttttagtagagacagggtttcaccatcttggccaggttggtattgaactcctgacctcgtgattcacccacctcagactcccaaagtgctgggattacaggcgtgagccaccacacccggcccaagcaccttctgctttcttgatctctatactggcaggtggtatttccaagaatgatgccccctctccaggaaacgtttgcacatgtctggagacatttttgattgtcacaattggtggtgttgctggtatctggtggtaaggaacagtgatatgtgtttcctccaaatctcatgttgaaatatgacccaaattgttgaaggtgggccgagtgaaaggtgcttgggtaatggggttgggtctcttctgaatggcttggtgctttctccatgataatgagtgagttcttagtcttagtacactcaagacctacctgtttaaaaaagactagtggcctggctggtggctgaagcccgtaatcccagcacactgggaggctgaggcaggtggatcacaagatcaggagttcaagaccagcctggccaagatggtgaactctgtctctattaaaaatacaaaaagtagccgggcatggtggcgggcacctgtaatcccagctactcaggaggctgagacagagaattgcttgaacctaggaggccgaggttgcagtgaactgacattgtgccactgcactccagcctgggcaacagagagagactctgtctcaaaaaaaaaaaaaagaatccttcttctagtacacagatgcattttaaaggggtcttctctactgctttttctctcaaaatcaatttcagtttggcctgtctgttcacatttacatgaggatccaaattgttgttttcataggtaaatgagtgactgagtatcctcagcttcgaacagaaagagcattttgctccttgcagctgataggcacccctaggtgaccgggggcctcatgggagtatctgggaagttgacccaccgtgatgtgtagtggctctacagagaacccccacaaaattagttttaaaaagactaatccaggaggtgcatatgggtgctagtaacttgtgctttgagccctcctggaggtgcttagacctccggaggagaaactgagacacataggagggcggcagtgactcagtggtaacacactgcggagtctcttttgcaagcagcacatactttgacctactccacaaaaccctaggccacatctccttttctccttttaaggaaacaaacaaacaaaaaaagtgggaaccaaataatctaagaacgaggagaaaaccagaagaatgacgcccctttcaggcactcctttggttttatggcacctcttcttgcaagtgtttgtgtgacatgaacttatatggtctttttgtgcagaagtacatgaaggaaaattcagagcccaaaggtcagcctgcaactgtaaagttcccaagttctctctctgctttcttttctgcctgcttgaagtccactgctacttttctaatgagataaaatccactgtttgcaatttctttttgaaaaccaatgagtttctactaatacctcatgattaaagttctgaagtaaaagctacatgatctttggttatatgagaatgtatgtgtgtgctaatgtgtttgtatacgtattttgttgtgttttggacacaaggcgctaaattggcttaaagagtcctcgtaaattaaataataagccaaaatgtttctcaagttcacatgacttaagtaaaatctttaataagttagctttaaaagtattggtaaaataggccaggcatggtggctcatgcctgtaatcccagcactttgggaggctgaggcaggtggatcacctgaggtcaggagttcaagaccagcctggtcaacatggtgaaaccccatctctactaaaactacaaaaattagccaggcatggtgttgggcacctgtaaccccagctactcgggaggctgaggtgggagaatctcttgaacccagggggcagaggttgtggtgagccaagatcacactactgcactccagcctgggcaaaagggcaagactctgtttcaaaaaaaaaaaaaaaaaagtattggtaaaataatattagaaatgtcttaagaattgccagcatacatttttgtttgcatttattgatcaagcaatttcatagttatccctgccaaatactattgaggcaggaaaatagcagagggaattggagtttggataaagggtggaatgagtaggagcagaagaaaggtgaagaggtgggtgcccaagcctgtcatgaatggtctgtgtaagtcattaataagaggatttatgaaaaaaaaaaaaccttttatatttcaagttgtatataaattaaacagaaattataatggtctttctagtgactgggttttgatccttaaaaaaaccacttatagactaaataattggatcaaaatacaaaattttcctaaggtattgctttactcttaatatattattacaagacactataatttttttacacaaagttcaacttttattgtgtcttgctgttttcagctttctctcctcttttaaaaggcctgaaataataactctatccttcaactaattttcagctcctgtaagtttttctcttttagtttctaactgttgtggcctcatgccaacatcaacaaaatgttttatcctagaggtctaaaggaaatgtttcctttcaatgtaatattccccataggaaacagcagttgcactggaggaggtcttttcttttgcctttagataactggcctaataaacagatcttacactttatcaaaataattcctatgtcattattactaagtttggtttggttagaaaaaaactgaaattaaaaaatttttttttaattaaggttatcacatccatgtattttctgtatgtgcttttttttttttttaaagagagtctcactttgtcactcaggctggagtgcagtggcatcatcttggctcactgcaaccttgtctccaggttcaagggattcttgtgcctcagcctcccgagtagctgggattacaggcacacaccaccatgcccggataatttttttgtatttttagtaaagatgaggtttcgccatgttagccagcctggtgtcaaactcctcacctcaagtgatctgccaccttggcctgccaaagtgctgggattacaggtgtgagccaccatgcctggcctgtatgtgcttttaaagtccttgtgtcactaagttacagagctttgacgtctgggtctaaaaaggacaccaagtcctgctaaatcttaaacactgacagcagttaaagcctcattttcagacctaatagaagatgccaatcaaaataaactgtgttcttgagacgcaggacaagaaagtaaaactattcaactcctcaaggcccaggggctattacagaagaggtgggcacatgaaattgcaagagcttacctggagagataaaataagttcagtttctctataaattaaccattgatgtcaaaggcacactgatgcaagaccagcatatgagcctctttgtcagattaacaaggttttcttggagcattgacccactccataataaagattacaatggtagtaaaaaggcttctggaaatcatatcttatgggcaagatgattaaaattttagattgtttacaaaattttgaataacaaatttaattagcctcatgctctctttattagggattattgtttgagaaattaagtgtcctctctcaaaaaataatggtttgcacctttttatgaaatctttgtggtatcactttggttaaatgaaggacttattttacaatggcctctgatcctattttgtgatgtcaagcactttaaagtttgtcaaatattttttgtcaaactttaaattgggtcctcattaatcttttcatattagttccctgaagtccgaaagaggcacattaagtttatttggtataaaaatcaaacagaaagcattgtcaaataggaaatggtgtttggctttctttgggctgtatttgtataaatatgttattggcatgtgttccaaaattatgagaaactcttgtaactgtgatatgacttcatgtatgttattaataattgtaattattatgtaaaattattgtatgccacagaagtaaccaaaagttctagtcaattgtgctttaatagtggctgtcctaagacttttttgtcatttatggacaattgttgtcttattttgatcctcttcacaaggtgatttggccgggtgcagtggctcatgcctgtaatcctagcactctgagaggcttaggtgagcagatcacttgaggtaaggagttcaagaccagcctggccaacatggtgacaccccctccctactactagaaatacaaaaattagctgggcttggtggcatgtgtctgtaacccagctattcaggaggctgaggcaggagaattgcttgaacccaagaggcagaggttgcagtgagccaaaatcatgccactgcactccagccggggccacaagagcaaaactccatctcaaaaaaaaaaaaaaaaaggctgggcgtggtggctcacacttgtaatcccagcactttgggaggccgaggtgggtggatcacgaggtcagcagttcaagaccagcctgaccaacagggtgaaacctcgtctctactaaaaatacaaaaattagctgggcatggaggtggcacacgcctgtaatcccagctactcaggaggctgaggcaaaagaatcacttgaacccaggagggagaggttgcagtgagccgagataatgccactgcactccagtctgagcgacagagcgagactccatcccaaaaaaaaaaaaaaaaaaaaaaaaattgttgctgatcctttgttttgttttcagagacaagaaaacttttcttatgagctgttggcagctgttaacaactgaggaaagtatactcctgtaaacaaattttggtgcatatttgtctctctgcttttgaattatctggaatttggaaactatttgtgagtattcataacttatggcaatacagttatttgcataagtgcaataagatttttttttagctggtcatggtggctcaagcctgtaatcccagcacgttgggaggctgacataggcggatcatttgagcccaggagttcaagtccagcctggccaacatggaaaatccccatctctacaaaaaatatgaaaatcagccaggtgtggtggtgcatgcatataatcccagctatttgggaggctgaggcacaagaattgcttgaacctgggaagtggatgttgcagtgagccaagatcacaccattacactccagcctggttaatagagtgaaaccctgtcttggaaaaaaaaaaaaagttttcttttgcaacagaataccatcagagaaaatggctattttaccaaggctttgactgaaatggtgtgctttcctttaaggaatcaaacttgattcatagagcccattaaagccccttggaaaactagtctcataccctgcctacagcatccctatacagggtttctgacctgtgttaagtaaagaatgtccctttctgataggcccaggaactccaagttatcttgggacctcaagaggagaggaatttacccaactcataggtatttggtgatacatggcaatggctgggcttggcttttaaaaagtcttacctgatattccttttgtggaacaaacttccatcaaagccaatataaagagtctgtgtgaaaaataatgattcttgctgcacttatacgtataaacaggccaagaataataaagcaaatcagtcataccatgattggtctttagtaaaaacaggaaactggagtgagaaaaattatgtttcaaaaactacagtacatctgttgttagactctagtctcgcctattgtttttcaatttttattattttctaaagtttggactgaattctaacttttctgggctacacatctccaaaataatgtttttaattttttccctccttcttccccgatttttctaatttcaaatcactaaaaactaagctgtgctttcttaaagccctgagaaccgaagctagacaacttaaatgtcagaagaagatagtaacagcctatttacatatataaggcactttcatacctggctactgatgtatgaacttcagagtaatatggcccatgtcaattttccgaaattgttatttttctgtttgttgtttctctccctttctccccccattttctctccgcaggacatgagacttcacaacgtgcaaaatgtgagctttcctaataatatgggacctccctctctaggaataaactgtcctagccatgagggatcagaggaaaactaagaacagagactcatgttcttctaaaatgatttctctgaaaaatttttaaaaagaaaaaggcattagatgggagagttaaaatcatcattaaaaaaaaccaggggtgggggaatgtgagaagtcctgggaggtggaggttgcagtgagctgagataacgccactgcacactagcctggaggaaagaccaaagactctctcaaaacaaaacaaaaacctcaaattgaatacaatattttataaactgaattggccttttccacatatgttctggctcctttgacatacataacgtcctgagttttaacaaattttgtcttgtagttattgtgtagtatgtaatattccaggccaatcttggagaagcaggcttggttatccctagtatgatttcaaggatgtgtagtctgttgtgagaactggttttaaattttaccacactgattacatttgtaaggtttctctccagtatgaatttggtaaagactgaaaacacactactgcttaaagtccctttcatgttcagcacattcataggatttttctcctatataaattctctcactccaaaagcatgaacatttgattttttttttcttttttttgagacagagtctcgctctgtcgcccagtctggaggcacgatcttggctcactgcaagctccacctcctggattcatgccattctcctgcctcagcctcccaagtagctgggactacaagcgcccaccacctcgcccagctaatttttcgtatttttagtagagacggggtttcaccatgttagccaggatggtctcgatctcctgacctcatgatccacctgcctcggcctcccaaagtgctgggattacaggcgtgagacaccgcacctggccgaacatttgattttttaaaaagtcttactacatttgttacatttgtaaggtagctcttcagtatgaatactctggtttccattttgatgttcaggtaaaagccttaccacacatattacgtttgtgtggttcctctcaaagttgtatattttgatgtctcgtgagttccgatgcctggggaaagtctctggcacatacgtgtagatttcctatcagtataaactcccttctgtccagtagggattgaactctggtaaaggttttgccacactcttttcatttgtaaagcatctctgcactatgaattatctatagatccacaagttttgatctttgaatagaattcttgccacacatactgcatttcagtaatttctctccaatatgtatattctttttttttttttttttttttttggagacaaagtcttgctctgtcgctcaggctggagtgcagtggtgtgattttggctcactgcaacctccacctcccgggtttaggcaattctcctccctcagcctccaaagtagctgggactatgggcacatgccaccatacctggctaattttttgtattttagtagagacggggtttcattctgttgcccaggctggtgtcaaactcctgagctcaggcaatctgcccacctcagcctcccaaagtgctaggattacaagtgtgagccaccacacccggccttctagtatgtacattcttatgccaagtgagtagtgaacaataccttaaaacttagctacatttactgcatgtgtaaatgtattgggccatatttgaattgctataaagaactatccgaggctgggtaatttataaagaagtttaattgactcacagttctgcaggctttacaggaaacatggtgctggcatctgctcaccttccgaggaagcctcaggaatgttaaaatcatggtggaaggaaaaaggggagtgggcatgtcacatggcaagaataggagcaagagagaggaaagttccatacacttttttttttttttttttttttttctggagacagggtctcgctgtcacccaggctggagtgcactggcacgatcttggctcactgcaacctctgtctcctgggttcaagtgatcctcatgcttcagcctcctgagtagctgggattacaggcatgcatcaccatgcctggctaatgtttatattttagtagagacaactgttcaccacgttgaccagcctggttttgaacacctggccacaagtgatctgcctgctccaacctccctaaatgctgggattacaggcatgacccaccatgcctaacgtgccatacacttttaaccaacaagatctcagccaggcgcagtggctcacacctataatcccagcactttgggaggccgaggcaggcagatcactaggtcaagaaattgagaccatcctggccaacatggtgaaactccatgtctactaaaaatacaaaaattagccaggcatggtggtgtgcacctgtagtcccagctactcagggagactgaggcaggagaatcacttgaacctgggaggcagaggttgcagtgagcctagatcacgccactgcattccagcctggcgacagagagagactccgtctcaaaaaagcaaaacaaacaaaaaaacaagatctcaccagaactcactatcccaagaagagcaaaaagcgggtggtgctaaaccattcttgagaaatccacccctgtgatccaatcatctcccaccaggccccacctccaataaaggggattaaaattccacatgagatttcagacggaagtgacaaatatacaagctatatcaataagtatgaattatttgaacccagaagttaggagaacatctaaaggcttttccacattgaattttgttttaagactctctgcagtatgttttgtctgatgtttagtgaggcctgagcgactaatgaaagatttgccacactcattacatttataaggtttttctccagaatgaatcatttggtgtttgttgaggcaagaaaaccgcccaaaggccttgccacattcaatacatttgtatggcttctctccagtgtgatttctttgatggtacaccagctttgacctttcaataaaagctttaccacattcattacatttgtaaggtttgtccccagtatgcattttctgatgattaaccagaattgaacgcactctaaaggctttgccacactcattacacacgtaaggtttctctccagtatgaatactccgatgacgtgctagtgttgattgatgacgaaagaccttgccacattcattacatttgtaaggtttctctccagtgtgaattctccgatgccttgcaaggttcgaagtggaattaaagacctggccacattcaatacatttgtatggcatctctccagtatgccttctctgatggtacgtcaggcctgttatatgactaaaagttctaccacaatggctacatttgtgtggtttctccccagtaggatttctgtgatatcttgcaagttttgaactttggataaatgcccctccaaactcattacaattgtaaggtttctctccagtatgaattatcagatgtttagtgaggcttgaacgctgagtataggctttgccacaatcattacatttgtaaggtttctctccggtatgaattttccgatgacgtgctaggcatgagtagtaactgaaaaccttgccgcattcgttacattgaaacggcttctctccagtatgaattctcttatgatttgaaaggtttccactgtcattgaagaccttgccacacacattacatttgtaaggtttctgcccagtatgaattcttagatgacgtgctaggcatgagtagttcctgaagactgtgccacattcattacattggaaaggtttctctcccgtatgtattctcttatgaattgaaaggtttccactgtaattgaagaccttgccacacacattacatttgtaaggttgctccccagtatgaattcttaaatgtcttacaaggcatgaattttcactaaagacctttccacattcaccgcattggtaacgtttctctctggtatgaattatcttatgtcgagtgagtaatgagccctgtttaaaggctttaccacatttatcacatttgtaaggtttctctccagtatgaattctccgatgccccacaagatgtgaagtctgactgaagaccttgccacattcattgcatttgtaaggtttctctccagtatgacttctctggtgccttgcaagttgtgaacgttgactgaagaccttgtcgcatacatcacatgtatatggtttctctcctgtatggattatctgatgtgtagtgaggctggagctccgtttaaaggttttgccacactcatcacatttgtaaggtttgtttccactatgaactgtctgatgagttgccaggttggaactttgactaaaggactttccacatatgttgcatttgtatggtttctctccagtgtggattctctggtgatttacaagattagaattctgcctgaagaccttgccacatatatcacattgatatggtttctctcctgtatggattatctgatgtgtagtgaggcatgagccttgtttgaaggttttcccacactcattacatttgtaaggtttctctccagtgtgaattctctgatgtattgcaaggttataactttgactaaaggacttgccacattcattacatttgtacggtttctctccagtgtgacttctccggtgatttacaagatctgaattttgtctgaagatcttgccacatacaccacattgatatggcttcccccttgtatggactatctgatgtatagttagtagtgagccccgatgaaaggctttgccacattcattgcatttgtaaggtttctctgtagtatgtaccatctgatggttaataagacttgaagacactctaaaggctttgccacaccctttacacatataaggtttttccctaatgtgtgttttctcaagttgggtgggtaatgacagctgcaaaaactcattctcatattttttagaaatgttggtttggacactaggaagaattctttgaagtggtgaaactagggaactgttattaactgtcttctcagattggttacactcataaattttcccttcagtttgaaatttctgcagttcagtcagacgtgactgaaagcttaatgtaagctgattttcaatacatttgttttctacatcctcttgactatgttgacctcttttaccattaagattgtttttataggtcattggcacttctttataatttatttcaccatctttccattgaaactcaaggtcctgtagatttttctggatttcccttaagtaaaaattttcaacatcataacattcatgtctttccagcgtcactgtttggcatttttctcctgtattactgttccctattggtggtaattccttggtcatacatttaggaaggatacctacaaaatataatgaacatgggagttttttcgttggtttttttttttgagacagagtcttgctctgttgcccaggctggagtggagtggcacaatctcagctcactgtgacctccacctcctgggttcgagctattcttctgcctcagcctcctgagtagctgggactacaggcacacatcaccacacctggctaatttttatatttttagtagagacagggtttccccatattggccaggctggtctcgaactcctgacctcgtgatccgcccacctcggccccacaaagtgctgggattacaggtgtgagccactgcgcctggccgaacatagattttaaaaataactagtattatttgtttttttttaaataactactattcataaatattttatattgaaaacatactacactaaaagtaacgtttatactagacagttaccaaactttaccacaatgatcttctatttttacaaataaaaaaggagtagaattcttcagtaaagaaagagtaatcacatgtaattcaaattaattttaaggaaacctagtttcaaacattcaatgactgaaagactcatgttgtgcaaacatatattagcactaaaacaagtatttttccaccatgcccccaaatcatacatcaactggcagcaaacatatggctctctcagaagagaaaatagttatatacatatatatttacttcatatttattgtgcatgaataaatgtcaaattacagctaaatatcaacaagttcaactaattaatgttctatataaatggcaagctagaattataaatcaaaaatagtactgggaaaatgagaaagaattttttgaagttataacactaagttatttttctgaatacttattatataagtattaaacctgttctaaaactacctatttctggccgggcgcagtggctcacacctgtaatcccagcactttgggaggctgaggtgggtggatcatgaggtcaggagttcgagactagcctggccaacatgatgaaaccccgtctctactaaaaatacaaaaattagccaggcatggtggtgtgcacctgtaatcccagctacttgggatgctgaggtaggagaattgcttgaacccaggaggcagaggttgtagtgagctgagatcgcgccacagcactccagtctgggtgacagagcaagactctgtctcggaaaaacaaacaaacaaacaaaaaactatctatttccataaaaaatagacatttgcaacactaacaagcagtgcaagtcagctatattgacttatgtctgccaaaactcgtatgttggggtcctaatcctcaatgtaatattacttggaggtgtgaactttgggaggcaattaggtcaccatggtagatagaatttcaggaacggaataggaatttgagtagatgtgaaaaagcttttgctttttgcacggcaatccttctgccatgtgaggacacagaaagagttagtcatgatacaccaggaaaatggcccacaccaagaaccaaggtgactggctctgacatgtggactgctcatcacccagatctgtgaaaagtgacttcctgttgtttaaacgaccctatctatggtatctgctatacctaaccacattaagttaaagctaatatgccatctcattataaacatgaaataatgttgatataccttattaaacaaagaaatttgtgagtctttactataaaacatgcaatattctaagctagcaaacagcactaacttgttttaaaaaatcttaagataaattatcactattttacaaataaggacagtaagactgcccacaggatttatgtatctacacccaaattacgaagaaagtaagacatgaacctgggtttccgggatcaaacatgtttttaaataaaactggccaaacagtcagtgcagataactggtcactccaaataccaagagtgtggaaagaaatacttcaagagccaatgtgtgttgccaaaacattattcagtcacccttcatgaataacagtatctgagccatcatcccctgcacatattgacatagacagtgttctcagaaagttgtcaagtgaatgagttacactgagtgtaacatggaaggtgagggagtactgcaataatgggagtgtaaaattaatatgctagtaagtaactgggtagtccatctggaccaaagtaatatgtttggaagaggcagggaggaggaagggcaagaggggagggcaaagagttataagcatggggcagcagcgtttgtgcttgcagagctgtgggtatataattgcccaaagaatagttaaaatcctgactttggaagaaaagagagatactaatttagaagtagcgtggtgactcacgcctgtaatcctagcacttcgggaggccaaggcgggcagactgccgagctcaggagtttgagaccagcctgggcaacatggtgaaactccgtcactactaaaatacaaaaaattagccgggagtggtggtgtgagcctgtagtcccagctactcaggaggctgaggtaggagaattgcttgaactcagaaggcggaggttgcagtgagttgggttcacgccactgcactccagcctgggagacaaagctagactctgtctccattaaaaaaaaaaaaaaaaaaaagtaccattatactgactaatacttaaatatgggaattctactaagggcacaggacaacaagggaagacattcaaaaaggggatagtgtgatgatatgggaaatgaaaggccagatgcagcattatgaagctttttatttgtgagtcaacaaggcttcagtctcagtcaaataatggaagggctcccaagaaagacaacagagaaaatacaaaaatacacgagggcagatcttaacttctagagcaaaattatccttacccaggaagaccaggttcctgtagttctccaacatcacatcccagtacaaagctttctgcacagggtccagggatttccactcctcctgagagaattctatggctacatccctgaatgtcaaaggtccctgaaatgaaaaacacatttcaacatgagcaatgggagagctcttatctatacataaaatgagaagaggagagaactgtcacatcaatttgattgtgtgttttcacatatccatgcaaggcatctgtgagaaggttatgtgtccctaatttaagtttgttttaaaattcaatagaagattatgatatcccgtaaatcagtgtaggcttctcatttttgtgtacaatgcaagaaatatacaaagaaatgaacacgtggttatctgtataagtattagatattatgttcaatatatcaactgagtgtccagatgagctagtatacaagtggtgtcttggagatgacaatgtccatagaagctttaaagaaaggtcagaaactaaaaactgtgatgaccacagcaacagcaatgactgaagttttggaacactccccatgtgctgggcattactccaaatgctttacatgttctaattcaaataataacataatagatagagagatagagagatttgttcccatgttactaggagacaactatgtcacagaaaacgctaaaaagtcacctaggtcaacaacctgaaaatggcagagcaggcatctaaatccagatgtctgagaatcagtcttgaatcaaaagaaacaaatggttaaattatggttacggtatgtcttagtctctctgtgctgctgtaccaagtaaaacagactgggtaatttatgaacaatagaaatgtatttctcatgattctgctggctggggaaatccaagatcaaggtgccagcaggactgatgtctggtgagagatgatcctcgcttccaagatggtcttgttgctgcacaggggacgaatgctgttgtccccacatggcagaagggacagaaagggcaaaaagcagtgaactccgtagaataagccttttgatatctcattgacgagaacaccatacccactgataaaggcagacttctcatgatccaatctcctcctaaaggccacgactcataacatttaaagattaggcactggggattaagtttcaacatgaattgtggaggagaaaaaaaaaaaaaactcagactgtaacattccacccctggcccccaaaattgatatacttctcacaaacaaaatacattctatcctaatggctcccaaagctttatttctacaaccaattcaaaagcctatagtctagagttgtatctaactataatctaaatcagatatgggtgagactcaaacatgcatttcatccaaaggcaaactgctttctagttgtgaacctatgaaagcaaacgagttatgtgcttccaaaatacaatggtggggcagacacaggttaaatatttcaattccaaaagggagaaacaggaaagaaggggtagctgttcccatgtaaggctgaaacccaacagggcatacacattaaacactaaggcttgacaataatctttgactccgtgtcccaccttctagacatcctggagtagaggttgggtcccaacatcctggggatccctgccctagtggttttgttgggatcaccccacatggaagttctcacagtgcctgcagctctcccgagctggaatcacataccggtgactctacagttttggggtctcaaaggtggccctgctcccagggctttactggaccttatcctaacagggactctctgaagttggccccacctccacagctagactgagcattgccttagtggggacttccagggacagcctcactcctatggcatttttatgcctaggctccaaggatctctgaggcattctttgaaatctagatggaagtaaccgtgagtccacatctcatgccctctgcacacttttagttagcactgtgttgatgttgccaaggtttacagtttgtgtgttgtaaccgacctcaatccctggtggactgaacaaagcgggtgaacgcgggaataaaagaaaaagacaagagagtatatttggaagaaggggccagggggcatcttgcctctagtggacaagggccctgagctttttcagccctccaaatttattaggtaaaagagataaccagaagtgggggtgattgttggtaactcagtcggccgtttggatcacagcaggcttgcaagactgcatccttccaacaataagctctagatttcccagtagataacttcaaggagcccggcgccagggagtgacggccctcagcaaaccttctggcggcaggcgcagtcgtgagtttgcccacatcctgcattcatggtaaacagtttgctgtttgatcatatagcctccagtggaatgctaagttgatcacgatccctttggcctttttagctcccaacagtgtgtgccctctggagtggtggctggtccgcacctggccccacttcagtcataggtggggtagccaaggacctctgctctgaaatacagagatcacagacctgaggtatcagagttccgaggtccgaagggcaccctgggccactcccttgaaactattctgccctcaaggccctggcactctggacctacaatgggcacagcagtctcaaagatctctaaaatgcctttgggatgattctctgattgtctcaataatcaggtcctggcttacttctatccatactaatctccttgtcagaggccacttggctacacccctcttggttttctctcctaaatacacttttaattctttacatggccaggctgagaattttccaaatctttacactgggctttgaaaacaaactgtttttaactcatttctctcttctcctgttttactataaacaggtcagagaagccatgcagcaacctgaacaatttgctttgagagtgtttctaacaaacatcttagttcatcactcttaaattctgctttccacagcccgggtgcggtggctcacgcctgtaatcccagcactttgggaggccgaggtgggcggatcacaaggtcaagagatcgaaaccatcctggccaacatggtgaaaccccgtctctactgaaaattcaagatgagatttgggtggagacacaaccaaagcctatcaactggtttctgtcttgcctgaatataatcactgaaaggaacaggatgaaaggttaggggccactgagaaaaaagaagattgacataaaccagtgtgtgcagtaacacggaaagacactaggtaagatctagtaccataggtgactgcagcaccagagtcttcaatagcgcagacaggtaacaggggagcttctgagtagaaaccagcaaacctcttcaattaggagatgacaagcaaaggctcagagaggacacaatccccagtcagaaaattataattgtgtgtgtgttgttgttgttttagatggatcgttctactgaactccagcctgggcaatagagtgaaaccctgccacaaaagaaggaaaagaaaaagaaggaaggaaggaagggagggagggagggaagaacaagaaagaaggaaagaaaaagtgagaaagaaagagagtaatggccgggtgcagtggctcacgacctgtaatcccagcactttggggagccaaggagggcaaatcacctgaggtcaggagtttgagaccagcatggctaacatggtgaaatcccgtttctactaaaaatataaaaaattagccaggcttggtggtgcgtgcttgtaatcccagctactcaggaggttaaggtaggagaattgcttgaacccaggaggcagaggttgcagtgagctgagatcgcaccatcgcactccagcccgggcaacaggagtgaaactctgtctcaaaaaaaaaaaagagaaagaaagagaaaggagggagggagagagagagagagagaaaaggaaggaaggaaggaaggaaggaaggaaagaaagagaaagaaaaagagagaaagaaagaaagactagagctaaaaataaaataactgagttgaaatagtcactagatgagttcaacagctgacttaatcagacagaagaaggaatcagtgaactcaaaggggattttgacagggagagaaacaaaaactataaaaaacagagaaaaatgaagagagcatgaggggctcatggcaaacaatcaagcaccaagaacatatgtattctggaagtccaataaataatgtgaatatatataacattacttaactgtaagtaaacaaacaagctttactgaaaggcataatataatcaaaggctgggttcaatggctcatgcctgtaatcccagcacttctggaggctaaggcaagcggatgacttgagttcaggagtttgagaccagcttggtcaacatggtgaaaccccctctctctgaaaaatacaaaaaaattagctgggtatggtggtgagtgccaatagtcccagctgctcaggaagctgtggcaggaggatcccttaaacctgggaggcggaggttgcagttggcccagatcatgccactgcactccagcctgggcaacagagccagattccatcaccaaaagaaagatgcatgcaaagaaaacgtaagcaagaaaaccttagatctaaaagaaacatagtattttatgatcactctgtgagccaggccttccagaaaaagataaaggaaaacatttatttatttttgcttttgtggtatgccatcctaaaagaggcactcactctttaaactgcccaacctggaggaaacttcagacatctgtggtaaagatagcatgcatacaggcagccacggtgacattctttgtaacagcaaaaaacagtaaaagacccatacgtcttcatttaggcactgctccaaagaggatgcaaaacaaactattagtgtttattaacataaaaatatgtacacttcaaaaacttgcaaaacaaaacttcacagcagaacattcactgaagaattgttttctgaaatctcataatgacgtgtaaatgcaacttgacacctctcactgactcttgccacagaacttgcaacagtagctccccacagaaacatgagggatggtggatgatgtgatagggaaaggaacctgggttcccccaggttgggcacttgaaagagtgatcgcttcctctaggatggtgcatttcctgctttgctagatctggcaagattctccactaccctgagctgcaaagcagccctctcccaccaacatcacacgagatttctcactcatttgaacaaaacctactactatgtttcttttagatgttgaagatctggggaaaatgataactctttgcatttccattttccatttcattaatttgtagaaatcaaaataaaataatcttcattctttgctcaatttttttttactgcattctagcagccatttcatattctgtagttaaattttcagaatatatatgccttaatgtcctttttttatttttatttttatttttggagacagagtctagctctgtcacccaggctggagtgcaatggtgcaatctcagctcactgcaacctctgcctcctgggttcaagggattctcctacctcagcctcccgagtagctggaactacaggcatgcgccaccacgccaggctaatttttgtatttttagtagaggtggggtttcactatgttggccaggctggtctctaactcctgacctggtgatccgcctgcctcagccttcaaaagtgctgggattgcaggcatgagccactgcgcctggccaatgtccttttttaagattataaatttttttttagcataaaactgaaatgtttccttgatgccccatgttttatgtttgcttataaattttatggtatatataaggtatacaacatgatattacagtatagatagtaaaaaaagtcactatggtttaacaaattaacatatccatcatctcagaggtacctttttttttgacaggaacagctaaaatctaacatagcatgaatttcatatataataaaatattattttcctatcatcttcatgttgtaccaacttcttttttttttttttttgagacggagtctcgctctgtcgcccaggctggagtgcagtggcacgatctcggctcactgcaagctccacctcctgggttcatgccattctcctgcttcagcctcccaagtagctgggactacaggcccccgccaccacgcccagctaatttttttttttttattttttagtagagacggggtttcaccttgttagccaggatggtctcgatctcctgacctcgtgatccgcccgcctcggcctcccaaagtgctgggattacaggcgtgagccaccgcgcccggcctgtaccaacttcttaatgcctcaactgcatctctgcttggacttttactgcaaacaaatatattatgtgatgtttaaaataaaagaaatatgatgttcagtaataactggtggaatgagagaatttggctccatcttctctaataacaaaggagttctgctcctacatctgagcaaaattataacctttttacataaaacaactgcgaagagtcccagcatgaacaccgcagtctctgtgggacggatacagtgacaatggctaaaagaatctgacattcaggttgattttatattttaaaatcaatgatgggccaggcacggtgggtcacacctgtaatccctgcattttgggaggccgaggcgggaggatcacctgaggttgggagttctagaccagcctgaccaacatggtgaaaccccatctctactaaaaatacaaaaatcagccgggcgtggtggcgcatgcctgtaatcccagctactcaggaggctgagacatgagaatcacttgaaccagggaggtggaggttgcagtgagccgagatcacaccattgccctccagcctgggcaacaagaacgaaactccgtctcaaaaaaaaaaaaaaaaaaaaaaaaatcaatgataaaataaacaccctctatcactgacgtgtgtatctaattgtccattccattcccagtcattaagattttgaagttagaaacagtgattaattcatacaccttcaaatgtagtataaaattaggcagaaaagatctcccctcataggtctcttttccagaatttatgaggtatcgtgcacattaatatgtgacttccgtgtgcagcttctctacttctggtctacagagagctgactgcatcctgattttgcctctaaacaatctctgctgccaacagctctgacattgtggggcccataccccgtctccatccgtgtctgggtgtgagtctctcccaggaccatgcccagtggagcctcttcccaagttaatgtcactgggtcgcagtgagatagaagctaaatgagatgagagaaactgagggaaggcatgggtgaatggcagcaaacgtgtcaggcaggatgcttcagactcagaggagattcgcaactccaatgtgtcgcatttcaaaaaggaaggagacagaatgatccactaagaatatcattttacctgtgtaagagccatccctgactccttttctttcctcttcttcctcttctgggcttctctctcagtcaatataattaattctttacaagtcaaatctgaaagtgaaaaatctgttgtttaatgcttggaaacaacacattcctttctgcgctacaaccatgcccacagggaagacctcagcatgtggagagacagcccactgcaccagggggatgcaaggataataaattcctaaacaaagaccaagtgtcctggcatggtggctcacgcctgtaatcccagcaccttaggaggcagaggcgggcagatcaactgaagtcaggagtttgagagcatcctggccaacacagtgaaaccctgtctctactaaaaatacaaaaattagccgggtgtggtggcatgcacctgtagtcccagctactcaggaggctgaggcaggagaattgcttgaacctgggaggcagaggttgcagtgagccgagatcatgccactgtgctccagcctgggtgacacagcaagactccatctcaaataaataaatcaatcaataaaaataaaaaagaaaatgtatgatgtgtctgtatacatatctttatgtgtacgtgtatttatatagatatatatagtatgcgtacatatgtataatggacttattcaaccatcaaaaagaagaaaatcctgctatttgcaacaacatggatgaaccatgcaatctccgcctcccaggttcaagcgattctcctgctatttgcaacaacatggatgaacctggaagacattacgctaggtgaaataagacagacactaaaagacaattactgtatgacctcacaagcagaattttaaagtatccaattcataggaacagggtagaacagttgttgccaggggctggtggtggggagaatggaaaaatgttggccaaagcgtataaactttcagttataaaatgaagaagttcaggggaatctaacgtacaccgtggtgtctatactgtattggacactttaacagtttggaaagtttttgaaaaatttaatgagttatagggtgaaagtttaaaaaaatgacaatacttaacatttagaaatgaatgacgtcagctgattataggatgccaccaaatcttatttcagaagtcagtaattatttatagaaaggcagatattgaataaactaacacttatctcaagcttccaaaataacgatgaattaagtggaactacaaagaaaaaagtaggccaggcgcagtagctcacacctgtaatcccagtactttaggaggccgaggccggcagatcacctgaggttgggagttcaagaccagcctgaccaacatggagaaactctgtctctactaaaaatacaaaatcagccaggcgtggtggcacatgcctgtaatcccaggtactcgtgaggctgaggcaagagaatcacttgaacctgggaggcggagattgcagtgagccgagatggcaccattgcactccagcctgggcaacatgagcgaaactccgtcccaaaaaaagaaaaaagcaaatccattaccaaaaaaaaataagactctgaatactcatacaaagatatacctcgtaggcctggcgtggtggctcccgtctgtaatcccagcactctgaggcagaaagactgcttgagcccaggaggttgaggctgcagtgagcggagatcatggcactgtactctagtctgacagagcaagaccctgtctcaaaaaagaaaaaaaaaaaaaaaagacataccttgtagtgacagtgacagtcatttatcgccccatttctcagttactctatcctctaccccatcccagggaagaaaagagttaccacgaatgacttaatttaaatgctctctggctaaacagaaattccaaatatcttttgatacaaataaatacaaaatgcacaagccttacagaaaagagtggtaattttcatcctcacgagtacaatttaaagaaatgaattttaaattagagtataaagtcacaaattagaatattacaaccaccatccatatccaatcaactcatcgctcatctggatggggtcctctcccactttcttcactattgtgtgtgtccctctctcattctgcacctttcctccccttttctgtttttctcctctttatgtctgttctgcccgatgctctgcaacttacttcacctctcgtagctctttctccccaatctttctgattgtccccaatctccacgtatttccgcctctttttccccatctgagctccctctctgctctccttgttaaaattccctcttacctgttacacctcctttgttcccactctctagcacccccaactccctaggcttcctccctgctgtggttctccctctactctgcttgtcacccactgccctctctccctctctttcagtcccagcaccacgtagctctgtcggctgcggctccaactctttcaccttctccccactgtctgtctgcagtgcctcctcctttgccgccccactctattttgctgcctttcatctctctgaaggtccccctttttttctaaatttctctgtgtgctttcctccccctgcttctttctccattcgttctctttcactcttgctgtctctttgcaaatccctaaattatcatccattttgccgtgtatttatgggtctccctcattctcttctattcggtctttccttttgctccgtcgctccccttcttttcctctcctgatccctctcacccacacattcagtaagaaaggggaggaataggatgcccacctcccggaaaagcatattttccagtggagtaaaatttgggaaggaagaacactgggtgtcacaagactcaggtgacctcccccaagggggggatcgagaaaagcagtggctgtgaaggggaagcctggggagcgaaaggacccggcgtgaggaggacacaaggtggcagggggtacggtgtctcaggacagggagggtctgcagaatcccaggacctgggaggagaagcgactccttcaggagccggacggcgggcgctcccctccaggggctgacgacggagaagctccggggtcgcaacgggcgggaatccacctcccgagtgaggactcgacttggcgcagggccgaagcagaggtcagtaagggttttaagcaggaacacgacctgagtggggttgtctacatggtcctaaggcagaaaggcagggagcaaggaacagcctcagagagatttttaaaccgaaagggaagcaattatcagacttacttggggcgaaggggctgttgctggtattttaaggtccgtagcgatccccaggaaacgggtatggacaagggaagactgccaagtgcacgttcgattcaggcagacggggcgaagcaaatgtttagtccaggtagacggaaactgacgcgcagcgctgtgatcttttccccgcgcgatctgcttccgggtgtgcaggaagctacacgccctgagaaaaaagactgagagacctggggcgggagaggggcctgggcggggtgcgacccgcaagggaaagggcagaaagactggccagatttgggaaccctgaaagggtggggcaaggctgatgcggtagtgggcggggccaggtgggctaagcgggacgggcggtgtgggcgggacctgtttggtgggcggggcctgttattcgctctgccttccacccagcaagtctttgttctcccgatttaggagtatttgtgactatttcttgtcctgtgaagcagcgttgcttcctgcctattttaagttaatgttttagactttaaggtcaaagcttaaagttgtggtccacttctgttggaaactaagatgttttcttcttgtcaagttgaactgatttaagtcaaaatcgatttttgcgagcctggtggactccatcgggtcttgccagtgaggctgaagccagttaaggctgaagttactcagtagtcagggaactaggatctccgtgaagatctgatgtgcagccgtggctggatccaggaaccctgaagacattatgctaagcgaaatgtgctagacacagaaagacaaatcctgcatgtgcttacttacatgtgcaatctacaaacatcaaaattacagtaacagagtagaagggtggtttccagggctgacggtctatcctgtgcctgtcccaccattgtattttggaagcaaatagcttctttggcttcacagtttcacagctggacagaaattttgcctcaggatgaaccacactttgagtctcacccatatgtgattcagataatatttgggtaatatttgggccttagagtttgatactgaaatggattaagacttttgaaatgggccaggagcagtggctctggcctgtaatcccagctctttgggaggccaaggtggaaggattgcttgagctcaagaattcaagaccaacctggggcaacatagtaagacccttgtctctacaaaaaatacaaaaattagccaggcatggtggctcacgcctatagtcacagctatttgggaggctgaggtgggaggatctcttgagcccaggggatcaaggctgcaatgagttgtctttgcaccactgaactgctgccagggcaacagagtgagactctgtctcaaaaaataataataataagacttttgagatgttaggatgggggtgaagggatcttgcatgtgagaaggacatgaattttgggagtccagagtacagaatgttatgagctgaatcacgtccctaaaaaatcattgttggccaagcgcggtggctcatgcctataatcccagcactttgggaggccgcggcgggcggatcacaaggtcatgagatcgagaccatcctggttaacacggtgaaaccctgtctctactaaaaatgcaaaaaattagccgggcgtggtggcgggtgcgtgtggtcccagctgctccggaggcagaggcaggagaatggcgtgaacccaggaggcggagcttgcagtgagccgagatccagccactgcactccagcctgggcggcaaagcgagactctgtctcaaaaaataaataaataaataaaataaaataaatcattgtctttaagttctaacacccagtacctcagaatatgactgtattttgaaatagggcatttagaggctattaagttaaactaagcttgttagaatgggctctgatgcaatctgactgatgttttgataagaggaaatttggctggaagcagtgcttcatgcctgtaatcccagcactttgggaggtcaaggtggatggatcacttgagctcagaagtttgagaccagcctggccaacatggtgaaaccccatctctactgaaaatacaaaaattagccaggtgtggtggcgcatgcctttagtgccagctactcgggaggctgaggcaggagaattgcttgaatctgggaggcagagcttgcagtgagccgagatcgcgccactgcactccagcctgggtgacagggtgagactctgtctcttaaaaaaaaaaaaagaaaaattagccgggtgtggtgtcacgcacctgtaatctcagctacttgggaggctgaggcaggagaatcgcttgaacccgggaggcggaggttgcagtgagccaagatcgtgccactgccctccaacctaggctcaaaaaaaacagtgtgtggcacctccccattctctgtcttcctcctgtctgggcatgtgaagtacttgcctccccttcaccttctgccataattgtaagttttctgaggcctctccagaagccaagcagatgccagcatcatgcttcctgtacagcctgcagagccatgagccaattaaacctcttttctttataaattacccaatctcaggtatttctttatagcaatgtgagaacaaactaatacactggcactacaggcatgtgccaccacacctgactaattttcaaattttttgtagagatagggtttcacgttgttgtccatgctggtcttgaactcctgggctcaagtgagcctcctgccttggccgcccaaactgtaaagtagataaaatttaaaaaatgtatatttttccaaggccgggggctgtggctcacacctgtaatcccagcactttgggagactgacgggggctgatcacgaggtcaggagatcgagaccatcctggctaacatggtgaaaccccgtctctactaaaaatacaaaaaattagccaggcgtggtggcacgcacctgtagacccagctacttgggaggctgaggcaggggaatcgcttgaacctgggaggtggaggttgcagtgagccgagatcgcgccactgcactccagcctggggacagagtgatactccgtcttaaaaaaaaaaatttccttcagatgagtaggtaattaagtaagaaagaaatataaatcttaaaaaagggctgggcatggtggctcacgcctgtaatcccagcactctgggaggctgaggtgggtagatcacctgaggtcaggagttcaagaccagactgtccaacatggtgaaacccagtgtctaccaaaaatacaaaaatcagcccggcatggtggtgggcgcctgtaatcccatctactcagactgaggcaggagaatctcttgaacccaggacaggaaggttgcagtgagctgagatggcaccattgcactccagcctgggcgacagagcaatacttcgtctcaataaataaatactatttttccttcctcgagaaactcaaagaaggctgatctgtatgtgatccgcaattgacttttcagtcagtggtcctttgctgtgacccacaggagtgtgacattctatggatggattcttctccctgagaccagaacttcatcttttgcatatgatcagaggcttttagaggctctgcattacttttcggatcaacaccattacacaagtttagcctagagacagctgacgtgggaaggtatcttatgaacaaatactgttgcactcggctctcttgcagggatcttgctgccccttaataatttcctccagggccactgaaagacgctagaatttttcctagatctgtctcccacacatacatagattggaatttttggataaaagctctgtttaggccgagctcgatggctcatgcctgtaatcccagcagtttgggaggccgaggcaggcggatcccttgaggtcaggagttcaagaccagcctggccaacatggtgaaactccgtctctactaaataaaaaaatacaaaaattagccaggcgtggtggtgcatacctgtaatcccagctactcgggaggctgaggcaggagattctcctgaacccaggaggcagaggtggcagtgagccaagattgtgccactgcactccagcttgggtgacagagtgagactctgtatcagaaaaaaaaacaacaacaacaaaaaacctctgtgtatcactctgagccccgcccaacctgtatctctagaaggatgatattctctgaggagacagatcttaggtgtctctttgcactgatgttattgatttagcaaggaaaacaaataggcaaatatcagtttatgctggtgatgggatctagtgatctcttacttgacttgggtctctgatttactcaaataatgataaaaattgattctcctctagatggcagaaaaacaagaggagctccagcccacacaggaggtagaaagtagaatctatgccacgtggagtccagtttgagttcagccataggcactgagtgtcctcccacaaagaaatggctctctattatttgaagggcactcttgttggcactgctgcctggagctactggacactgagagcgtgcatctcagaccagagttctaggcctgcatcacagagcgacggaacagcacaaaggttctttagtgcggagaagagataaaaaggagaaggtgagccctgaccctcctcccaccatccagtctagccaaccccagcaaatgtctgaaaccaacccaatcccttcactgttctttttcctttttcttttgagacaggggtttactctgttgcccaggctagaatgctgtggcacgcccaggctagagtgctgtggcacgatcacggctcactgcagcctcaacacctccaggctcaagtgatcctcccaccttagcctgccaagtagctgggactctgggactacaggtgcacaacaccacgcccagctaatttttgattttttatagagacggtcttactatgtttcccaggctggtttcaaactccagggctcaagctatctagccacctcagcctcgaaaagtgctgggatttataggtgtgaaccaccatgcccagcccactgttctttttttaaactctaaaaaatattatatcttttagctttttctctttcctttcttttttagacagggtcttgctctgtcacccaggctggagtgcagtggtatgatcaccacagcattgacatcccggcctcaggcgatcctcccacttcagcctcccagtagttgggactacaggcatgcgccgccacacctgttgggagccgaaaaggccaaagggatcatgaccaactcagcgttccgctggagactatattatcaaactgcaaactgtttatcatgaatgcaggatgtgggcacactcacactgccctgccaccaaaaggtttgctgagggcctcactccctggcaccgggctccttgaagttatctattgagaaatctagcacctattgttcgaagaatgcagtcttgcaagcctgctgtcaatcaaactgctgaccgacaaccccccaccgctcttgctatctcttttgcctaataaatacggagggctgtgtaggaggactgtgtaaagctcagggtccttgtccactagaggcaagtgccccctgaccccttcttccaaatatactctcttgtctttgtcttttattccctcgttcaccctcctttgttcagtccccctaggtccgtgccggctacacacacctagttaattttttttttttcctgtggagatgaggttccactatgttgcctaggctggtctcaaacacctgggttcaagggatccttccgcctctgtttcctaaactgctgggattataggcgtgagccacttgcatgtggtcccttcactcttctctaagcctccatctattccatttccatcccctcatcatatcaaacataccctttgggccgggcacggtggctcacacctgtaatcccagtactttgggaggctgaagatgggcagatcacttgaggtcaggagttcgagaccatcctgggcaacatggtgaaaccccatctctactaaaaatacaaaaattagctgggtgtggtggtgcacacctgtagtcccagctactcaggagactgaggcaggagaatcacttgaacctgggagacagaggttgcagtgagctgagattgccccactgcactccacttgggcaacagagcaagactctgtcttaaataaataaataaataaatataaaaaacatataccttggtaaaactttatttattccacatgtaactgagatctcatatgagtctagcatcactcttagagagctagactttaacctcattaatctatcatcctgaaagtccatcgttttcccacaaatgtttgctaattcccagggatttatactctcaggatctactatgtcctctattcaagctttcttgtaaaacttgtctttgctttaaattaacacagcttttctttctagtagcccccaaaaaaccacattcacagaaaagcctcacttagccatttggcctttttttattcatttttattttgagacagagtctcactctgtcacccaggctgtggtgcaggggtggatcatagctcactatagcctcaaactcctgggctcaagggatcctcctaccttagccttctgagtaggtaggattacagatgtatgccaccaggcccagtgtcaggcctctgagcccaagcctgcatgtatacatccagatggcctgaagcaactgaagaatcacaaaagaagtaaaaatggctagctcctgccttaactgatgacattaccttgcgaaactccttctcctggctcagaagctccccgactgagcgtcttgtgacccccgcccctgcccacaagagaacaaccccctttgactgtaattttccactacctacccaaatcctataagactgccccaccccatctcccttctctgactctcttttcggactcagcccacctgtacccatgtgattaaacatctttacttattattatttttttttccccgagatggagtcttgctctgtcacctaggctggagagcagtggcgtgatctcggctcactgcaacctccgcctcccgggttcaagccattctcctgcttcagcctcccgagtagctgggattacaggtacccgccatcacgtccggctaattttttgtattttgtatttaggggtttcaccatgttagccaggatggtctcgatcttctgaccttgtgatccacccgctttggcctcccaaagtgctgggattacaggcgtgagccactacgcccagcaaaaagctttattgctcacacaaagcctgttggtggtctcttcacacggacgcccttgacacccagctagtttttttgttttttgttttgttttgtttttggagacagggtctcgctctgtcacccaggctggattacaatggtgggatcatagctcaacctcctgggctcaagtgacactcctgtctcagcctcctgagtagctgggaacacaggcacacaccaccatgcctggctaatttttgaatttttttgtggagacgaagtctcaccatgttgcccaggctgttctcaaaccccagggtcaagtgatcctcctgccttggcctctcaaaatgttgggattacaggcatgagccaccatattgggccttttttttaagagagagatggggtcttactatgttgtccaggttggcctcaaacttctggccacaagtgatcctcctgccttggactctcaaacagttgggattacaggtgtgagccaccgtgcccaaccctggcctttattaaagacactgcatggctgacacacaaggaaagagatgccatccagctccatgggaaacagtttcgtaaccttattgtaattatttttcttccagtcccttctgggctgctcttgcattgggggcttgaagctcttcccttctacctgtgcagccccttaccctgctgtcctgctcttctctgtcctggttcctctctccctcaacattttatgttctccatctatataggtcaattttctcccaaatctattctccaatttgtacacttaaactcattttgatttggagaatgtgagtcttccctttaacataattgtgtcccttatgagagcagttagttttaaatggcaacattattttgttgctttaagttttttttttttttttcctaggaatcttagctctgcagggttctttgagcttttaaaaactactttatggccgggcacggtggctcatgcctgtaatcccagcacttcgggaggccgaggcgggtggatcacgaggtcaggagatcgagaccatcctagctaacatggtgaaaccccgtctctactaaaaatacaaaaaattagccaggtgtggtggtgggcgcctgtagtcccagctactccagaggctgaggtaggagaatggtgtgaacccgggaggcagagcttgcagtgagctgagatcatgccactgcactccagcctgagcgacagagcgagactccgtctcaaaaaaaaaaaaaaaatgctttattaggctaggtctggtggctcatgcctgtaataccagcattttgggaggcctaggtggctggatcacctgacgttgggagttcgagaccagcctgaccaacacagtgaaaccccatctctactaaaaatacaaaatcagccagacgtggtggcacatgcctgtaatcccagctacttggcaggagaattgcttgaacccatgaggtggaggttgtagtgagctgagatcatgcattgctctccagcctgggcaacaagagcaaaactccacctcaaaagagaaagacagaaagaaagaaaaactactttattgaggtatgattgacatataaaaaactgtagatatttaatgtatacaacttcacgtgtttggaaataagtatacatccttgaaactattatcacaactaatgccataaacttatcaattgcctccaaaaattcccttccagttcatttcttcactccgctttggttttgtttgtccttttgtgataacataagatcttatataagacctaccctttcagcaaagttttaaatgtacaacgccgtatttgttaatcatgtgccctatgttgtacggtaggcctccagaacttgtttatcttgcaggactgaaactttgtacactttcctttttgtttttgtttttttgctttttgcttttttaatttccccatgaaattaaaaaaaaaaagtttctcttcatgagaaactttgcacactttgaccaacaccttttcatttcctcccacctctcagcctcttgcaaccactattctgctttctgcttctgtgtgtttgactattttggattccacatataaatgaggtcatacggccgggcgcggtggctcacgctcctaatccaagcactttgggaggccgaggcaggcagatcacaagctcaggggttcaaaaccagcctggccaacatagtgaaacccagtctctactaaaaataaaaaaacaaaattagccgggcatgggggtgggcgcctgtagtcccagctactcaggagggcaggagaatggcgtgaacccagaaagcagagcttgcagtgagctgagatcgtgccactgcactccagcctgggtgacagagcgacactctgtctcaaaaaaaaaaaacatacgagatcatatgttatttgtctttctgtgtctgtcttattttactttgcataatgtcccttaggttcgtccaagtcatcacaaatgacaagatttccgtttttttcctttttatttgagacgcagtttcactctgtcgcccaggctggagcgtagtggtgcgatcttggtccactgcaacttcgacctcctgggttcaagcaactcttctgcctcagcctcccgagtagctgggattacaggtgtgcaccaccatgcccagctaatttttttgtatttttttagtagagatgcggtttcaccatgctggccaggctgctctcgaactcctgacctcatgttctgcccgccttggcctcccaatgtgcttggattacaggcgtgagccactgtgcctggcctgttttttttgagacggagtttcactattgtcacccaggctggagtgcaatgtccctatctcggctcactgcaacctccaactcctgggttcaagcgattctcctccctcagtctgccgagtagctgggattagaggcacccaccaacatgcccggctagttttttgtatttttagtagagacgggggtttcactatgttggccaggctggttttgaactcctgacctcaggtgatccaccagcctcggcctcccaaagtgctgggattacgggcgtgagccaccacgcctggcctagatttccatttttttaaaggctgaatagtgtgtgtgtgtgtgtgtgtgtgtgtttatccatttatcagtgaacatttaggttttttccacatcttggttattgtggcaataaacataggagtgcagatctctctccaagatattgatttcattcctttggatatataccatgaagggggattgctgaatcacctggtagttctatttttaattttttgaggaacctccataatgttttctaccaatttacattcccaccaatggtgtacaagggttccctttctccacatccttgccaatactatttcccgttaatattattttgtttttgagacagtctcgctctgtcgcccaggctggagtgtagtggcacaatctcgactcactgcaacctccacctccagggtttaagcgattctcctgcctcagcctcctgagtagctgggactacaggcatgagccaccatgcccggctgttttcttttgtttttttgaggcagagtcttgctctgtcatacaggctggagtgcagcggcacattcatggctcactgtagcctcacctcaatctcctggaccgaaccaatcctcccacctcagcctcccaagtacagtagctgggaccgcaggcagatgccactatacccagcttatttatttatttatgtttgagatggagttctgctcttgttgcccaggctggagtgcagtggcgtgatctcggctcactgcaacctccgcctcccgggttcaagcgattcttctgcctcagccttcctgagtagctgggattacaggcatgtgcccccacacctggctaattttgtatttttagtatagacggggtttttccatgttggtcaggctcgtctcgaacgcccaacctcagatgatccgccacctcggcctcccaaagtgctgggattacaggagtgagccaccgcgcccggctatttctatattttgagacggagtcccgctctattgcccaggctggtgtgcagtgatgtgtgatctcagctcactgcgacctccacctcctgggttcaagcgattctcctgcctcagcttcctgagtagctgggattacaggagcccaccaccatgcctggctaatttttgtatttttagtggtgcacatgcctgtaatcccagctactcgggaggctgaggcacaagaatcccttaatcccaggagatggaggctgcagtgagtcgagattgtgccactgcactccagcctgggcaacagagagactctgtctcaaaaataaaaataaaaaaaaaaaaaaataaaaaattcaaggttgcttgaagaagatataagactccggtgtcaggtccaacagactttattactgacaacacagcaaagaagcaaaaacttgatactcacgtcaatccccttgcacttcaagtccaacaggactgatgagaaagggtctggacagatgctttgcatacagtgagtgtgtaatgcagtgagtgtgtgccagaatgaagaatcctgagcttataaagcaatcttttaagagggccacaggaagacctccccaacctttgcttctgacatatgcatcattatatatattttttacagtggttaggcaacaaatctgcctctggccatggggactcgctgttgctatcttcctaaaccgtttgctatacaaacattcttggccgggcgctgtggctcatgcctgtaatcccagcactttgggaggctgaggctggtggatcacctgagatcaggagttcgaaaccagcctggccaacatggtaaaacccccgtctctactaaaaatacaaaaattagctgggcatggtggcggacgcctgtaatcctagctccttgggaggctgaggcaggagaattgcttgaacccaggaggtggaggttgcagtgagccgagattgtgccattgcactccagcctgggcgacaagagcgaaactccgtctcaaacaaacaaacaaacgaaaaaacacaaacaggccgggcgcggtggctcatgcctgtaatcccagcacattgggaggccgagatgggcagatcatgaggtcaggagtttgagaccagcctggccagcatggtgaaactccgtctctactaaaaaaatacaaaaaattagccaggcatggtggcacgtgcctgtaatcccagctattcgggaagctcgggcaggagaattgcttgaactcgggagggggaggttgcagtgggccaagattgagccactgcactccagcctggatgacagagcaagactccatctcaaaaaacaaacaaacaaaaaaaacccaaaaacattcttgataagatagtctggaacaaaagctttaaaaaatgtgaagatatgtgagatgccctgggagaattatctaccaacatagtgtacatttccctttaatacacgggaatagtcaatcttctgaacaaaaagatcccctggctgggcacggtggctcatgcctgtcatctcagcactttgggaggctgagacaggcagattgcttgagtccgggagtttgagaccatcctgggtagggtagagagaactactcaggctgagtgagcttctagacaggacaaataaaaagagcattgcaagtagggttttacaggggggtcacttgacaaggcaaataatgacaatttcctgggactgggactttgaagggactccagccctgttctcctcctgccaatggttgccaggttgctgttcctctctgacggagactgctggctttcaagtctaccgtggatcagtggagggacaatgaaatagggcaagttaaaaaaaaacccacaaagcttgctattcttcccaagattcagctgttttccttgaaagcgatgaatatcatccctagattgctgcaaactcttagttaatttccaaagattaaaaaaaaaaaactgtaaccccagcattttggaaggccgaggcaagcggatcacgaagtcaagagatcgaaaccatcctggccaacatggtgaaaccccgtctctactaaaaatacaaaaattagctgggcatggtggcacgtgcctgtagtcacagctactcgggaggctgaggcaggagaatcacttgaacccaggaggtggagactgcagtgagctgagattgcaccactgcactccagcctggacgacagagtgagactccatctcaaaaaaaaaaaaaaaaaaatgatgctgaaattgcttttttttttgagatggagttttgctcttgtcaccgaggctggagtgcaatggtgccatcttggctcactgcaacctccgcctcccagattgaactgattttcctgtctcaacctctccaacagctgtattttcagtagtaaggccttgggaaggtcattaggtcatgatggtggagccctcatgaatgggattagtgtccttataagaattctgtcagacacagtggctcacacctgtaagcccatgactttgggagatcaaggagggaggatcagttggggccaggagtttgagaccctgtctccacaaaaaagtaaaagtaaataattagctaggcatggcggcgaatgcctgtagtcccagctactcaggaggctgaggtgggaggattgcttgagcccaggagtttgaggccgcagtgagctgtggtcatgccactgcactccagcctgggtgacatagtgagaccctatggcaggatctcaccattttttcctccaaaaaaaaaaaattgttaaaaaaaattccagtattgtgcagtagctggatgtttcaaattttaaaaagaagaaaataaaaaataaaataagagtcttgatagaacttgcttctcccttccaccatgtgagaaggacacagctagatggcaccatctacgaatcagaaagtggaccctcaccagacgctaaattgctggtgccttgatctcagacttcctggcctcccaaactgtgagaaataagtttctgttgtttataagctacccagtttatggtattttgttacagcagcctgaactaagacacgttgcaacttccactttccattcaacatatatcgtccccatttctcttactccatacatacagatctaagtggtttttatgaaagttctttaataatccatagttggtatgtccgatattttatgcaataatctatcaaatagtggactttcctattttacatatgtagaaactgaggatcagggccgggcacagtggctcacacctgtaatcccagcactttgggaggccaaggcggatcacttgagcccaggagttcgagaccagcctaggcaacatagtgagacccccgtctgtacatttttaaaattaaaaaaaaaaaaggccaggtgtgatggctcacgcctgtaatcccagcactttgggaggccaaggcgcacggatcacctgaggtcaggagtttgagaccagcctgaccaacatggagaaaccccatgtctactgataatacaaaaattagctgggcatggtggcgcatgcctgtaatcacagctactggggaagttgaggcacgagaatcgcttgaacctgggaggcagaggttgcggtgagctgagatcgcgccattgcactccagcctgggcaacaagagtgaagctccatctcaaaaaaaaaaaaggaaactgaggattaggaaagcccaagacccaacatcaggaatgtctcctagtcccagaatctcttgcatttgtacaccccaccccactatgaactcaggcatagtaaaataatccaaaatcccccatcaaatattttatatatatacatatatatgtgtgtgtatatatatatatatacacatatatatgtgtgtgtgtgtgtatgtatatatatatatatatatatatatatatatatatatatatatacatacacatatatatgtatttctattttattttaattttttttgagacagggtcttggctgttgcccaggctagagtgtagtggtgtgatcatggctcactgcagcctcgatctcttgggctcaagtgatcctcttgcctctgcctcctgagtactacagggatatacctgatgtactacaggcatgtgccaccactcccggctaaactttctttcttttttgcagtgacaggggtcttgctatgttacccaggctggtctttacctcctggcttcaagcaatccttcctccttggactctcaaagtgttcagattacaagcatgagccaccaccacacctggattgtatcattatattaaagctgagttttagtcaagcaagcctttggagtcagactgcccaggttcaaattccagcacccgatgagtggggtggctcctgtttgtaaccccagcactttgggaagccaaggcaggtggatcatttgaacccaggagtttgagacgagcctgggcaacacagtgagaccccaggggtctctacaaaaattaaaaaattacccgggcatggtcacacatgcctttagtcttagctaccgggcattgggggggccgaggtgagaggaccacttgagcctgggagatcaagactgcactgagcacagaacagattgcgtccctacactcccagcctaggcaacaaggcaagaccctgtctcaaacaaacaaacaaattccagcaccactattaccatctatgagaacttggacaaattcctaaagttctctatgcctcggtttcctcatccattaaattaggatgatgctgctactttacatatatcatagagttattgtcagggttaaatgaattaatttactgaatacactttactgtagctattatcactggcattgatctgtataggtattgatttgtataggtattgatctgtataggtattgatctgtataggtattgatctgtataggtattgatttgtataggtatttgttaaatacttattaaagtttgcagttttgttttgcattttggaatccataatttgtttttattttgtttctgagatttataatgcctcatttaagcctctgaaaattcctaggccctaagcacttcaaaggccaccagcccaacatcccaagcagcctgacaccaagacaggcacgcatagctaaaaagatccctagcctcagagaccttggggctgagaggagtcctgggaatagggagggctgggactgaaatattcaaccccatccccacttttatgagcagcagtttcctaactgcagtgggtaagggtatttgaaatagatgctgggccgggcacggtggctcacacctgtaatcccagcgctctgggaagtccaagtgggcggatcacctgaggtcaggagttcgagaccaaagacagccaacacggtgaaaccccgtctctactaaaaatacaaaattagccgggcgtggtggctcatgcctgtaaattccagctactccggaggctgaggcagaagaatcgcttgaacccgagaggtggaggttgcagtgagcagagattgagccactgcacttcagccggggcaacaagagcgaaactccgcctcaaaaaaaaggccgggtgcggtggctcacacctgtaatcccagcactttgggaagccaaggcaggcagatcaccctgaggtcaggagtttgagaccagcctggcccaaagtggtgaaaccccgtctctactaaaaatacaaaaattaaccgggcgttgtggtaggcgcctgtaatcccaggtactctggaggctgagacaggataattgtttgaacccaggagacagaggctgtagtatgccgagatcgggcccctgcattctagcctgggcaacagagcgagactccgtctcaaaaaaaaaaaaagaaaaagaaaaagaagaaaaaagaaatagatgctgtgggtattcagatctgtcagagtgctagctcagcctagcccttcaagtagcagaataaaggaggaaagagcatcccaggccttcccatccccattcaactccctcagttagagtggtcctaagattgcggtgggggggtagggctgtgttgaagaggttaaaaacagagattagtcagatccaatcctgctcccactctatggaggaaacaaattcgaatacatagtcacagcccaggctctgggattgagagacagagagagagattggattggagagagagagagagagagatgggattggagagacagagagatagatgggactggagagacagagagaggggttctgtggctctggaagcctagagaacagagcctgaagacagagaggaaagggagtaaaggggaggcatttatgcagagatctcagaagtgaatatgaaaggcacccctagcagaacgcacagcttgggcaaggaggcttgctggcatgaaaacgcaagaagtgctcaggcagctgtaattctccaggacatcagataaaaggtaaaaaacagatgggagacgcgcctagacagggtattgaataccagcccgaggggcttgggtttcatccaaacagcaaggcaactgagctcaacacagtgagactcggtctccacaaacatttttttaaaaattggccgggcctagcggcgcgcgccgatagtcccagctatttctgcaggctgaggcgagaggatcatttgagctcggggaggtccaggcggcagtgagccaagatcctgccactgcactacagtctgggcaacagagcgagaccctgtctttaaaaaagtaaaaaaaaaaaaaaaaaaaaaagaaagaaaaagaaaaaagagagaagggcaagtcgctcccttctctgggccttggcataaatcaagcacaaatcaaagtctcactccctcctcctgccgcgcaacggcgcggagagccagccagccagccagcggaaccacggcctggtaacccaaaacctgcacaccctccagctccccacaggacgtcacgtattaccaccgacgcacgcgcagaagccttcccggggactcaagaaagggcaggcttagcctcctccccatgtcgcccctcattggctagaaactactgctcgtctcggtcgttgttagcagcgaccagggcgggtacaatcttggtcgctaggacacggctaacttccgctttcttccccctctcctaggctcaaactagtcaaatcttgttcactcgaccaatggcaaatcggaagtgggcgggacttcacaagtccggaccaaagaaacgcgagcttagccctgggtagcgcggccaatggccgtggagcagcccctgtaaactggctcgggcgcccccacgcccgcccttccttcttctcccagcattgccccccccacgtttcagcacagcgctggccgcagtctgacaggaaagggacggagccaagatggcggcggccgacggcgacgactcgctgtaccccatcgcggtgctcatagacgaactccgcaatgaggacgttcaggtccggaggctacgggggacttggggaagacgcggaggggtacctgggggcacgggcggccctcgcggagaagactcagcgttcgctgggagtggcggaagggggcgacggccaatcagcgtgcgtctcttatctccccggttgcccggactccttgagacggcgctcccgattgggtgtcggcccagtggagggcgggggccagcgctagcctcgagggtcccgggcctgccctgtgcgcgcggcggtccgcggtcctgggaggttgtggccagggctggggtctgcggactgggtctgggagagaggaggactccgtgattggcggcggcctctgaatggcctcttggggatgtggggcgcgcatgacttgctccaagtaggggagggccgccgggtgggtcgggacctgggaaggtttttttgttttctgggtttcgactgctgggccaagtggggaccgagaggcgaaggcctgccatcctaattcctgctcttcctccgcctctcattttggtttaggtgtcctaagaggacggggacgcaaaaacacccccccaccaaaggtggggactagccaagtttaggagcgaattaggttgtagaaacccgcctccccatctccccggatcctcccattgaccaggataggggttgagggatttgctaagcagatgaacatttatttatttcttttttttgagacagtctctgtgtcgcccaggctggggctggggagcagtggcgcgatctcggctcagtgcaacctctgcataccgggttcaaaccatcctcgcccctcagctccctaattagctgcgattaccggcgcgagccaccacgcccgactaatttttgtatttttagcagagacggggtttcaccatgttggccaggcttggtcgggaactcttgacctcaagcgatccacccgcctcggcctcccaaagtgttggaattacaggcgtgagccaccgcgcccagcccggatgaacattcctggttatgggatgaggtgacccaaggctctgagccgggctggtgtgggattgagaacagttagaactgcaagtccacctcccacctgctgtgtgaccttgtgcaaattacttcaccgctttgggtctctgtgttccataaaatatgggctaattgtagtcctggtcttgctggagggacttgtgagggactgaacgaattatgacacaaataaaaagtagaatggtgtcaggcctgttgtaagggctcgataaatattagctgtaattattgggagtggtgattaaagaggtcccatcctccctttaggtctgttttcccatttataaaattggacaaggtgcactgggtaacctgccaaacgtgggtctcgcctcctaggttcctggtatatcactgtttctggtggcatacaggttgtggttgtattcccggcccttccacttgttactgattgacaagggcaagttagttaatctctctaggcctgtttcctcttctctttaatggggttaattacctagttcatagggcggttgtatgaattcttttgttcagtaaatatatgccatgtatgagatatgatgctggggatatagtggagacaccagttgctatacaggatccagatgtgaaacaggtcagcagagctgaatagatgagtgtttgaaaagtgatgggaaggaaacaaataggatgtagtggtagcgaatccatattgaattgggcctctattctgtgcagggcgctgttctaagcactggtatatagcaggaacaagacagaaaaaactctaggccttggggagtttattttgtagtgaggagagacagacaataaacagagtatactggggataagcattagggagacaaataaaaataagagagatggggtatatatagggcatgcagttttaaagtgtggtcaggggaggccttgttgagatcctgtttgagaacacgcctgaaagcagagggcacagcaagtacaaagtggggtggggcagatccattttaagaaggccaatcaggcaaggcccctctgaggatgcagagtttgagaagagattgaaagaaggtgggggagagcctcccaggaagagggaacagatatgtaatggcctttttttttttttcttctttttttgagacggagtcttgttgctctgtttcccaggctggagtgcactgacgcgatctttgctcactgcaacctccacctcccgggttcaagcaattctcctgcctcagcctcttgagtagctgggactacagacgcaggccaccacgcctggctgatttttgtgtgtgtgtttttagaagagactgggtttcccggtgttggccaggctggtctcagactcctgatctcaggtgatcctcctgcctcggcctccgaaagtgctggaattacaggcgtgagccactatgcccggccagttttttgttttttttaactccaggatcacttccttcagctatctatcctcccatcttttcattcatccatccatccactaaccagcagacatttgtagggagatgtctttgtgccaggatcagagctaggcagcttaccggtttattctaaagaatattgcaaaggatacagatgaagacacatgcagggtgaggtgtgggggaagttgtgtggagcttccatgccctccctaggcattccaccccccaggaaccgcgaggtgttcatctgtctggaagctcctatggctgcttttgtgctacagcccagagttgcatggttgtaacagagatggccgcaaagcttcaaatatttgctgtctaaccctttgcagggaaaaaattgctgacctctgacttaaaccatctgcgtaacaaattattgggtgcttgctctatgttaggtacagtacagaggaatatcactgacgatcttactgaattctcacaatcactctttgaagtaggtcctgtccttgtccacattttccagatgaggaaactgaagcaccataaataacatggccaaagctgtgcagctgagaaatgaaggagccaggaaaggaagtaggacctaagggtggaatagaatctggggtgggacacacggttgctgattatattcatatgccagacattttaattgtgtctgagacagttcaggatactagaaggaacatgggacatgaaatcctgtagtcttgatttatttgttcagcaaatatttatcagcacctcctgtgtgccagactctgttttagatactagacatacagtagggaacaaaacagcaaagctgcccttgtggggtttacattctggtttgggagacagatagtagatctgtagtgggatgtcagtggcagtaattgctaagaagaaaaattgctggacgtggtggctcaagcctaattgtaacactttggttttattttattttattttttttgagacagagtctcactctgtcgtccaggccgtctctgctcattgcaacctccgcctcccgggttcaagtgattctcctgcctcagcctcctgagtggctaggattagaggcgcccaccaccacatccagctaatttttgtatttttagtagagagtgggtttcaccatgttggccaggctggtctcaaactccctgcccgcctctgcctcccaaagtgctgggattacaggcatgagccaccacccctggccaattctagcactttggaaggccaaggtgaaaggatcgcttgagcccaggagtttaagaccagcctgggcaacaaagtgagaccctgtctctaccaaaaaaaaaaaaaaaattagctggtgtgatgacacaggccttggtcccagctgctcaggagactgaggtcggaggattgcttgaaccagggagatcgaggctgcggtgagagcctgggcgacagcaagaccctgtctccaaaaaaaaaaaaaaaaaaaaaaaagaacaaaataagacaggtacagggaatagagcaagcacctggggctgctttgttagatagggaggttagagaaagctgctctgaggaagtgatgttgaacaaggatttgaatgaaatgaacaggtcgtggaagagcagtctgggcagagggaatagttggtacaaaggccaggagtgggaggatgcttgatgcgttcaaagcacagcaaaaaggccagtgtgactgaggcagagagaatggcaaagtggtgggaggtgaggactagaccaggactagatcaagtgaggcctgtgggccaaggtgaaggccttgaagatgggagggaggaggaggaattgcaaggctttcagtagtaattatgggttctggtataattttaaaggatccttcctctggctgtcataggggttgggccctgttgaggtgccattacaaagcacccaggaccagtgttagcatgcaggggggaagtatggttacagtcaggacatgttgaggggggctgatgggatttgctggtgggtaatgtagagggaagagttgagggtgactgaagtttgaacccccgctctgccagttgtgctctctgtgtgcccctggagcagtactttcccctctttggacccagattcctcatctgcaaaatggggataatgatgaagaatcagcgtgtgcctggttgtgaagatgcagtgaaattggcttgctcattgttctgcggtagtcatatggtggggattgagcagacctgaggaaatggggcatctggggaaccgtgtgggaccaagtcagcaagtgctaaagcctgggttgggaatacactgggctgtttgtttttttggttactatcaaggaagcagttgtgacaagccaggcccagtgagaatggatcagtagactagggtcagattgtgttgggccttgtaggccagagtaaggccttagcttttattctgaatgtgcagggaaaacatactacatgtgggattataccatatacattcatattatggaaggctccatgggttgaatgcagggtggatcttcaaaagtgggtcccctttccacaggtgcatatagtgggaaggcggattttatttattaactcaccacagagcaggctctgtgccgaggcctgctgggacacagagagtcccagtctagggtggtaagtgctgtcatggaaccatatgggtggactctttggaaaatcccaattcctattctctcacttaacacaacaatcaacaacacagaagaagacttccgtgactaaatgtgtgttggggtggggagggattcttcaccaccactaagcaagcattcagttctgcagcacacgccaactggatgtcctccaattcagttcagacacgacctggagacagtgttggatccaacaggttgagggctcaggcctcaaaactgccccttggccctcgccttcagttgccattctgggtcgtcagaacttctgatctacctgcttcaagttggagttcccatgaccaccctgcctttgggtttgattaatatgctagagcagctctcagaactcagggaaacatgtaagtttatcagttcattataaaggatagtataaagaatacagatgaagagaggcatagggtgagctatgggggaaggggtgtggagcttccatgcccttcttgggtgcaccaccctccaggaacctctgtgtgttcggctatgttgaagttcccaggccctgtccttttgggtttttataaaggcattgttaggtaggcaggattgattaaacctggtgatcaccttgaccttcagcccctctccgatccctggaggttgtggggtgggactgaaaatcccaaccctctaatcatgcctctctgttttccatgactatctttccagtgaccatggaccccatcctgaaggtatcagtcaacattagcatacaaaaagcgccttggagattccaaagatttgaggagttgtatgcaaggaaatggggatgaagcccaaatctgtatctcacagtatcacaactgtagcaggtgcttggtggggacacacttgggagatagtcagtgcacagggaattctcaggatatgacatgatcaatggccagtcaaggtttctgaaatgatattaatagattttctatcaggaatgtgacggagaccccaacctagagttgtttaaacaagtaagagttctctttatttctcatatagcaagttcagcagctcaaagctatcacagaattgggtcagctcaaagatatcacagaaatgcggtttttttgactggcctgttttggttataagattccagcagcatctgctgtcctagtggaactgcactttttagtgcagtttagcagaggccagcttaggacacagaggttctttccctcctcccttttatgaaggaggaaaatctctcctgaatctcctcagcagacttgcttgtatatctctttgccaagaactaggtcatatgcagagttagttgaagttaagtttggctgtaagtagtagaaaaactctaaataacaggggcttaaatgagcttgaagtttctatctgactgatgaccaaaatgtctggtggcaatccaggctgctgtggcacttcatggtgtcagggtcccaggctcttaccattatgcgctggttgtatcctccattctaccctccgtgtcccccaggttacctcaggtccccaagttggctgccgaagccccaaccattatagctccattccagacaggaaggagggaagataagtgtgacccccatccctataagttgcacaaaacatttccacttggattttattggccagatgttagttttatagtcacattcagatgcaaaggcaattcagaaatgtcttttccaggggtcatgtgtacagctgaaaaccaaggattatgaacagcagtatagccccatgcaggagctcctaacttggggatcatctgcaattcccaggcaggtccatgaatttggatggcaaaaataacatctttattttcattaacctttaacttacatttaacttcccttctgttatagattataatatcactatagtatatcataggtagcgttagcaaaacctgtgacttaccagtggaaatcaggagttgtgttcacatgtcatttctgctattatacatatcttctagtgttgtttatgttcacctctttcaaaattgcgttcattattagacctgctaaggggattcatggcaccaccccacccctctacaagagaaaaaccaaaaaaagccgggtgcagtggctcatgcctataatcctagcattttgggaggtcgaggtgggaggattgcttgagctcaggagtttgagggcagcttgggcaacatagtgaggcctcatccctacaaaaagttaaaaaactagctgggcttggtgacacctgcctgtagacccgtctacttgggtagctgaggcgggagaatcacttgagcccgggaggtcaaggctacagtgagctacgattgtgccactgcactccagcctgggtaacagagtgagaccctgcctcaaaacaacaacaagcacaacaaaaaagaaaaaacagagcaaatatgaatccatagtactggttaagaacctggtggctgggattcaaatcctggctttactaccagtaagctgtatgcagttaagctccctgtgcctttgtgttctctgcctcaagacgggggattctgtatttccctcatgggattgtgagggtcaaatgaattaaaacattaaagcctggggcatagtagagactaaggaaatatttactgttattattctgtcatggtgaaaaaagggaaaagaaacatcagtggaccagctgccacgatgtccttcttaataatctgaacaaaatcaggatgctgtcagtgaggcgtggttgccacggctgccattattaatcttcccctggtgctagggtgtccctgtagaatgtcattttgtactcaagacaaccctctgagggtaggtattctcatcatccccacttcacagatgagaaaattgaggctcagaaaggtacaaggattgcccaagattccacagctaatatgtaagcagtttagccttgaacctggacagtgcagctctgtagtaccaccctaggccatctttctcaagcattgatgatgctgtctgcctgaagaaacacttttaatgaaaccaaaagcagaatcccaaagaacagcagtggaaggaagggagctctctggatgggaaagcagcctgattgtcatgggcccacctcttgggcatccccagcttcaagttggggttcccacgaccccctctttgggtttgattaatttgctggagcggctcacagaactccaggaaacacttaggtttaccggtttattataaaggatattccaaaggatacagatgaagaggtgcatagggtgagctatggaggaaggggcggggagctttcgtgccatccctggggatgccaccctccaagaatgtgcatgttctgctatcaggaagctctctgaatcctttcctctttggtttttatggaagcttcatgatacaaacatttttgcctaaatgacagtatgatattgaaattgagtcaggctgcctggcttcattgctttccagtaagtgacagcctcacctctgtgcatcagtgtcctcactcgcctctgtgcatcagtgaagtggggacgctgctaacaatacatacctcagagcagttatgaggattcagtgtgttaatcatccatgtcaatcacttggattgctgccaagcacgtagcaaacaataaatgtttgttgctattgttctggcatttatgattatgattattaattgtaattattccctgtaccatctcattgtcctcagggctgttgctcacctagtatggccctagcccatgtgtatatttccccatagctcaggctgagagaagaacacacagatcaacttggagaaaacaaagaggaaagaaataggcaactaggtcaatactccccacagtattttatgttattttattttatttatttatttatttgagacagagtctcactctgtcacccaggctggagtgcagtggcaccatctcggctcactgcaagctccacctcccaggttcacgccattctcctgcctcagcctcccgagtagctgggactataggcgcccgccaccacgcccggctaatttctttttgtatttatggtagagacggggtttcaccgtgttagccaggatggtctcgatctcctaacctcatgatccgcctgcctcggcctcccaaggtgctgggattacaggcatgagccactgcgcctggcctccccacagtattttattatgaaagttttcagacatgcataactttggaagactaacacaagggtcagcagactacagtccatgggtccaattcagcccactgtctgcttttgcaagtaaagttattggaacacagctatgcctgtttgcttctctagttctggttctatggttgttttcagtgccacgcaagcagagttcagtagttaggtttgcaaagctgaaaataattactgtctggcaatgtatagaataagttttgctgacttctagcatagtgcagtgagcacctctatacttacaccccaggtcagtgattgttagtgtttgctatattagttttttatctttctataggtctgtctctatatacgttttattttttagctgaaaatcagttgcaggttttgtagtactttatcctgaggtccgtttaatgccagaatggtgagtttttggactacctgtatgaaagatttactgtgtgcatttttctgaggagagaccatcacaacacttcatcagatgctcatcgtctgtgatcgcagagatattcttcaactcctggaccggagaacccaactcacgcaagatcttagtcacttgtagacctcgtctcagttatgtagggcctcagaacagaacaggctaagggagctcctgctcctcaacctcgccctgtccctacctgttctgcctctatccaggaagaaaggtcccccgtgggaccattagtcactctccccctcatgaaagcatttcctcccactctcacactcatgagctcattccattcttgtgacagtgctgggagctattaataataggagaggcctcgtggtgatgaagaaatgaggggagagtttcacagtctgtcctgccatcagagcagctggctttggatcccacactccctcggtgcttgctttggtaggtgtctttacctctctgatcgtcactttccaaagtggtgaaaagaggatattagccatgcttttcttttaggatctggaggatcaaatgaggtcccaacatgtaaatgcttgttgtgagatctattatgtgtgttagccaaatataatagttctctaggactgccacagcaaatcaccatgaactgggtagcttaacacaacgaatttattctctcacagttctggaggccggaagtctgaaatcaaggtctcggcagggttggttccttttggaggctctgagggagacccattccatgcctctctggaagttaggacttctggtggctccagcaattccttgtgttcctgggcttgtggatgcatctcctggtctctccacccatcttcacatgcgtgccttcccctctgtatctgtcttcctttctgtctcttagaaggacactgtcactggattcaaggctaaccctccgtttaggatgatattatctggacacacttaactacgtctgcaaagactgttttgacgtgcacgtcactggattcaaggctaaccctccgtttagggtgatattatctggacacacttaactacgtctgcaaagactgttttgatgtgcacgtcactggattcaaggctaaccctccgtttaggatgatattatctggacacacttaactacgtctgcaaagaccgttttgacgtgcacgtcactggattcaaggctaaccctccgtttaggatgatattatctggacacacttaactacgcctgcaaagactgttttgacgtgcacgtcactgggacataactttttgaggctgctattcagcctcctgtactggtggtattattactactgctaatgctactcttgtttttgtagtcattttattacaataatttttttttctctttgagacaaagagtctcactctgttgcccaggctggagtgttgtttgttcttttacaatcacttagccagcaatcctggctttaaatcctgctccatgtgatcttagctgtctgaccctgagaggggcttttgttccccgagcctgtttccctgtctgtaaaatgggactccagctagtgacatgggtgcaggtgtgtggatgtgtttagccgaggaccgggcacagaggaagcgtgttataaacgtggctgctgctgttaaagtacagtgcattggcatgttacatgatactgtgtataggagaaagtgatgaagagagaggaggagagggagtacagttttcaacagagtggtcctggaaagtgcaactgagtaggtgtcaccttcataagacccaagggatgcttttgcatttgttgctgctgccactactattgttgttatttaatgattccctcgaggtcacagggtctcttggtgggtgtttgccaaattactcttgagcatcttcacatgtaaccaagcaaggcttccaggggctgactgggttgagagctgtcagaactcacgcgtgtctgggatttctaacattctcccctcctcttcttgttctctcattagcttcgcctcaacagcatcaagaagctgtccaccatcgccttggcccttggggttgaaaggacccgaagtgagcttctgcctttccttacaggtaacaaaggggacccctggggcccagatgtggggactcttgggaggtggttttcactatataagagaagacttgtggatttaacatattgtttgtgaatatctgccctgtgttagacactatggagtgggaaaagggattcagagaagtgcagtcttgctctaaaagaatggtctggaatgatggagacagatggtgaaagggatctagaagcaggtagaacgaggtttgagttgcagctccaacagttggaagctggtgactttagacaagttagtttacctgtttcttatatttttcatctgtagattgggataatcatccatgtgccaaagtgttgatctgagcattcaatgttaataacaattgctaatacttatgatatgcttactgtatgccaggtggtgttctacaccgtatcttgtgaggattgagttcatataaagtgtttagaaagctgcctgtactcagtaaacatacatcactatcatttcacccagttgatctcacagcagtgctttaagcaggtaatactgctgtccccatgttatagatgaagaaaccaaggtgtagagaggtgaagtgattcatttgcccaaggtcatgcagtgaggaggtaactgagaagggatatttatctagtcattctggcctttaacttgacagcattggttaatgactgatttcaaatctgagctctaccactttctaggtgtgtgactttgggcaagatattttacatctgcctgcttcagattcttcacaggtgaaatgggcataattatgtaacctaacatgaagactaaataagatactgtaaagtgcttataacactgtatagtacgtgccgcctaagcgatagctgccaggctgttactaagcactgctgtttgtgaggatgtaggtaaagcatttaatacactgtctgacacagactggaccacaattaatagtaaattctctgttatcattattcccattactacttcatattttatacttattaccagctgaaatcacagctgaaggttcagagtgctttgtcactaaactcttgtgtatgggaacatcttacttggacctagtgatgatcctggggaggaaggagcttgagattgttacccctccccacactggacagatggggtattggagcctaaagaggtgcagtgactcgcctacagtggcacagctagtgactgaggggtgcaggtgtgtctgactggatggtgcatgaagagtaggtgtctgctcgtatgacactgaacaaatggccccaaaccaggtggcttctattggtgaactgttggggagacttgaaagctttagaatgctgaagcatggcaggataataaagtggtgaagaagttgtagaggaaaaatgttggacctgggtttgcaataagcagctctgccactgacttgctaggaaaacctgagtaggtcactccacctctcttagcctcatttcccttgtctgtaaaggagtctaataagaggagtacctaacactcggggtgtgtagggaaaactctgtgactttcctctactttcacaccacagcaatcataacacagaacatgacttctgtgaccatatgtctgggtttttttccccaaactaagcagtggacagcagctggttgtcctctaattcagttctgacacgtctgcccagagacaggttcagatcccacagattgatagctcagtccccaggactgtccccagccctgaccaccagtcgctggtcctgtggaacttctgattgatcagcttcaagttgggattcccacgaccccctctttgggtttgattaggctcatagaactcagggaaacacttatgtttactggtttattataaaggattttgcaaaggatacagatgaagagatacagagaatgaggtgtgggggaaagggcctggagcttccgtgccctccctgagcccaccaccctcaagaacctctatgtgtttcaccatctggaagctctctgaaccctctgggtttttatggaagcttaatggcagagggtcctgagtggaacggaggcaccagccatgtggaactctgtgggaagagcatttcaggctgtggggagaggcagatgtaagctcagtgtgttggaagaatagcagtgaggtagccatgggttgagcaagattgttaagggagagtgagactaggacatgaggttggagaagaacagtgaccacagtatgtgagatcaggtttctttgaaactattggcagattgaaatgaaagagtgtcgggatttcttttacacctgaaagagtcactctggggtctgggagatcagatggtgtaggggcaaaggtggaagcaggaaaaccaggtaagaagctgttgcagtctcccaggcgacagctagtgatgatcagagtgaccttagtttgggagggttgacaggcttggctcagaaggagctgccaacccttccaagaaggatagttctctgtggattggtggaaagacaaggtgctggcagttcccaggtgtttggccttcagcagcattgcttggctataaggtctagactggagataaagatgaataagaattgagtccgtggatacgcataaggtcttcaggagacaaagaaaacagggagggtggttttaactgtgtgcagagggagccagggaaactgaggctgggaacgagcctaagaacagtgtagctggagtcacattggcgagaatttatttattgaaggaagaggcagagatactaaccctcctactgggccctgtgctgagctcttcaatgaaagcatttatttccctttagtctccgaacaaccctatgaagtgagaacagccctgtggtgatttaggggatgacaaaggctcagagagatgaagtgagctgctgtataagcagccaacagtaaagcaagatttgaacctaccataaaatggagatgatgataatgactccttaaatgagagggttgtggtaaggaggtgatgcagaagttgaacccaccacttacactcacacccctttggccagagcaaggttacgtggccttgccaactgcaagggcgtctgggaaatgcagtcggctgctggattgccatacacccaacttaaatgcaggaggtttaagtgccaatagatgccagggatattagcagcttgtgctgtgcagagatcagcagttcccactgcctcagggatgagaggatggagcttaagagagaggcctttggatgtgggcattagggacagaacggattttcccttcacatattcattctttcagcaaacctgaattgctgtctgtctgtgctcagctctggcaggaactggggcacagagaggagccagtcctgggctcgctgattatagcctatgttaaggatgtggtaaaggtggcatggaaggagagagagactgagcccagagaaggtgtagcggacatcctagaaatcttccaagaaggggcggctaaactgaatctccaaggataaaaataaatttctggcagagggaacagtgctgaggggagaagctggaccccaaaaaagctctcgttgaccatgctctgcgctttatacacctagtcatatttgctcctcactgtaaccgttgctacgagggagggatggtgaacaccattttacagacgcagaagctgggactcagagaggtggaatcactcagtcagtatttcacacccgctagagggcagaagcaggacttagggctctcttatcccagccaagcctgtaccttaatatctgtggcagcccaggtggagagtgggggagcaagtgggcggatggaagaactgagtgctgacagcctgaggaagcagaatggagtccatgtgttctgagcttgggctggggtcagagttgagatgggatagtcacgaagtctgtcttggttccacagataccatctatgatgaagatgaggtcctcctggccctggcagaacagctgggaaccttcactaccctggtgggaggcccagagtacgtgcactgcctgctggtgagtggaaggcaggaagtcctcttgcccaccccttagggtcggcccatggtcctgccggcctagggcagggaggggagcgtgtcagagagcgtggggatcacgtcagaacagccgggccatggacatccgctttaatccaacaagtcaggagtggcttttaatatcgtgaactcagggtgcagttatcatcctttctgtttagtggtcaggtaggtgcccagtgccaggccttacctgggattctacatagggctgtgggtttagagtcaggttgggttctactgcttatttgctgtgtgacttgtaagagaattacttaccctctctgtgctgtacctttctcatctgcacaatggggttatgaaaacctttttaaattaccttgaagagccctagcacagtacttggcacttagtaggtactaaccgatgttaactgcaattgtcattattgttgctgtgacatcatatccagcctttggggtaggagggattccctgtttatgggtgagccacctggagcactgagaggttaagcgtctcttcagattgtatgactagtagatggcagagctgggattcttggtctgtccatttgactgtctgccaggtccccaccccactgcctgcctgtgtgtcccgtgctaggtgatggccaaggacacaaagatgggccagatcccaacaagcagcgttgtttgagagaagatgatctgggaaggcagaccgtacaggttacctagtcccctggttttcactgttctcagagtgctgggccactgctgctgcctctgcctctgccccactcccccagtgattgtgtatttcactgtcgctagagatacaatgtggcaccggcagttgatggtgtattagttagcagcagcctttctcctagctctagtggtgtataaagaatggtgcttatcattgttgggatcttgggatttgagtaaatataacaatttgtttcttcccaaatagcattatgtaaagaaacttgatagttaccattaaattcggatatctcagccttcatctgggcatatgtgtataatttgtgcgtatggacacacagaaaattgtatacaaatagatcgtttcatacattttacacaaaacagggcttaacatgagcatgatgaggtttgggggccagcctagaaggggttccttgaatttcacaaaattatctgtagcccctgcctggtatttgtcaggtggaacttctgagcagtgaattcatagctttcagtagcttctcagaggacttaggagcagaagacattatttttatgaaaccgcaaggcttcaacaagggcccccagggtctgcaactgaggttgggactcaggcttgctgtggagctgggctgggacccagggatccttctcctacctggccagggtctcccaacagaacattctcagtgaggaaagtcccagtcaagccacgcttccttttgggaagcagttccctgtgaccgatgtgcctgacgttcatgtcagccagcagacacatcctggggctgtctgggccaggcagtgctggaaaccagagaagagttagatcagaatagcttgtgcttgctcgttgcctgcagtgcacatcccaagagccttacacagttgtatactgatgttagctgtattgcccagatgaggaaactgaggcacaggcagatttaagtgaattgtccgagctgggaagaggcagagtccagattcgatcccaggcccctaattcttagccactcctatgtgctatcctcagagggctcctggttgctttcagagctgtaaacaagggaggcaggggggtccttaaacccagggaaggcgcctaacctgcttaggtgggatgggaagttgtcagggaaggcttcctggaggaggtggctgttaacctggattttgacaggttataagaaatagaaaatggctttgtgtagtttcttcattccacaaacattgagcaaggtctctaggctatggaaacccagagatgtgtcagacccactcccggcccttgctctcagcagtggtgaaatggaattaattacagagactcctgtagctgcagtgtaaggattgtttttttgtttgttttgtttttttcccgagatggagtttcactcttgctgcacaggctggagtgcagtggcgggatctcggctcactgcaacctctgcctcccaggttcaggtgattctcctgcctcagcctcacgagtagctgagattacaggcgtgtgccaccgcacccagctaatttttgcatttttagtagagacggggtttcactttgttggtcagattagtctcggaatcctgacctcaggtgatccacccaccccggcctcccaaagtgctaggattacaggtgtgagccaccgtgcctgggtgtgagggttgtttctgtgtcagcagctctttttatttttatttttctttgagacagagtctcgctctgtcacccaggctggagtgcagtgttgtaatctcagctcactgcagcctctgcctcccgggttcaagtgattctcaagcctcagcctcccaagtagctgggattacaggcacccatcaccatgcctggctaatttttgtattttttgtagagacagggtttcaccatgttggccaggctggtctagaactcctggcctcaaatgatcacctgccttggcctcccaaagttctgggattacaggcgtgagccaccgcatccggccagcagttcctaactcttttggaattatggatccctttgagaatctgttaaattctggaccctcttcttataaaagtacacaggattttaggcggttcacactcttccctaccctgtgtggtctccaggtttgagaacccttgcccccagacttcacagagaggcttcacagtagtgagtcttcactgtgcaaaggcatcaattgcagtttcttaaatgtgtaccttcctgggccctgcctccagatattctgattgttttggtccatgctgggataggcctccgggtgattctgctgcagggtggtcagggatcatcctttgagaactacttcctgcagtaacctacaggagaagagaaccttggcttacataattactgctcagcctctgtcccaggcctccttataacagattgccgtaagttccaccggtagtcacttggcaagtgttgattgagtaccttctctgtgccagcccaggtggtgggagaactgaggtgaacaagaggaactctgtccctgcagtatcccagtcacaccgcacctatggtcacactcccatgatactgtcctgaacttgagacgtcacgatagcatgaggacctgtgacagtgacattatgctggcttgcttagtattacatttttcctttgaatcattcattgcaactatttttaaatgctatttttaaacatttgtttttattcttagttttactgtaaaaatatacatagaatgtgctattttaattattttaaagtgtgtagctctgtggcggtaggtttattcacattgtgcagccattatcaccctccatctccagaatttttcacctcctcaaactgaaattccaaacccattggacatgagctcccccttccctctcccccagcccctggcagccaccgtaggagtttgactgttctagattcctcatataagtggaatcagaaaatatttgtctttatgactattagctaatttcccttggcataacatcttcaaggttcatccatgttgtagcatgtgttacatgagacttctcacatacaagattcttgagtttttttgagggctgcatttggaaaaccagatttgcttattgccagctgcattctcccatagtgacagtccttggagctggggagcacctgccctccctgggctacatgccctccagggtgccacagtgcctgcctcttcctattcatgcctcctgccacccctgcctgtcaccttggctgatggcatcattctgttacttgactgagccctggaggcatttccatttatgattttttttttcctgctttaaatacctgtcagcccaagttgaatttcagatcagagacctccacacctttatttgaacatattgggataagttgagtctcccttcagtaggtcactaattaagagttcctgtcttgtgctaagagtgctgctgggctctggggatacagtggagagccagtcgtatgtatctgaaggagcacagtcattctaggcccacagtaacaaccagcgagcagtcccgagccccatagtcccccagaaacatgagatcccaattcagtcaccagagctgtgtgtaactgttcatgggaagcttaggtcaggttttcgatcctgacctgtagctattactagcttgggcaagccaggctgtacctcagttttctcttcttttttttttttttttttttctttttgagacggagtctcgctgtgttgcccaggctggagtgcagtggtgcgatctcggcttactgcagcctctgcctcccgggttcaaggattcttctgcctcagcctcccgagtagctgggattacaggtgcgcaccaccacacccagctaatttttttgtatttttagtagaaacggggtttcaccatattggccaggctggtcttgaactcctgacctcgtgatccacccgcttcagcctcccatagtgctgggattacaggcgtgagccactgcgcccggcccgttttctcttctttaaaatcaggacttgctttatagaattcagtgaggaagaacaagcacccctggtacaacacggaggtcctgcctagtacacacagtgagtagatgttctacacagtgtcagtgatgatcattgcactttgagaggctaagaactttctcctcagaaagcaacgtgtgtaattttaaggtttatggaccccagtgaaactccttcaaggacccctaaataagaacctttgtggaaggcacgctgacagagaccttctgctggctggcataatattacgtttttcctttgagtcattcattgcaaccatttttaaaggctattttaatgaaggtcgggatgggtaatagggaagttttctctgaggagatgagcccatgatggggtgcaggatggggctccagggctgcggatggtggagagggagctgtccagtgactttgtgttctcaccacagccaccgctggagtcgctggccacagtggaggagacagtggtgcgggacaaggcagtggagtccttacgggccatctcacacgagcactcgccctctgacctggaggcgcactttgtgccgctagtgaagcggctggcgggcggcgactggttcacctcccgcacctcggcctgcggcctcttctccgtctgctacccccgagtgtccagtgctgtgaaggcggaacttcgacagtgagtctctgcctccttggaagctccaagctcccatctcagctccaaccttctctaaagcctcagactccttttggtctagctggggcccaaatgcccctgaactctctccactcccactcctgcttaccacctgataggccacatcctcgagagttggtctctggacacggccacgtgtcagtttacccacctctgcccccttgctcacttaggaattgagatgatgacaggtcctccttcccactggttaatgtgaggatttaaaagaattatcacacataaagtgcttagagcaaaatctggaacataaaaactttcagcaacttacatctgatggtatctccagcctgtcccaggtccagtgcctttggcagataaaccacctcagttttcagcctcctgctcgtctactttgcaaacgattgaccgtcaagcccgggtttgagcctgactcactccagaactctggtttatggctgtacacttgcttagatacttacactggcccccaccgcctttgatcgaagcaattgctgctgaaaaataaagcctttctgtggctctagacctgcctcttagttaagcagttttttgtttgtttgttttttgagataggatctcgctctgtcatccaggctgaagtgcactggtgcagtcatagcccactgcagcctcaacctcctgggctcaagcattcctcctgccttagcctctcaaatagctgggaccacaggtgtgcaacaccacgctgggctcattttttatttttggcagagatggggtctcactatgttgctcaggctggtcttgaactcctgggctcaagcaatcctcctgccttggtcttccaaagtgttcagattacaggtatgagccactgtgcctggctcgttggttaagcaatttttatgggaatgatgtaatcgtcagcacttagcattgactagatttattatgcgcaatctgcgaagtgtctcacacacactattttcatttaaacctcatgcggacctgtggggtaggtactgttactatcagctccgtttcatagggctgggaagacagagagggggtcatcacttgcccaaggtcattcagctaaaacctggacccacacaactgcagagtctgtgcttgctcctctctgccatactgcctgctgcctcaggatccccgtccccgactcccaggtacttccggaacctgtgctcagatgacacccccatggtgcggcgggccgcagcctccaagctgggggagtttgccaaggtgctggagctggacaacgtcaagagtgagatcatccccatgttctccaacctggcctctgacgagcaggtgagttttgcttcctggccctctgctctcccgtccttctggtggttcctgcccatgaaagagaatcccagagctcagcaaggcctctgctgccctcccactgttcctctcctctccctaggactcggtgcggctgctggcggtggaggcgtgcgtgaacatcgcccagcttctgccccaggaggatctggaggccctggtgatgcccactctgcgccaggccgctgaagacaagtcctggcgcgtccgctacatggtggctgacaagttcacagaggtagatgagcgaccgttgacattgtcccactggtggggacactgacactctcagaagggaagcatataggagctgaggtttccattaggccgatggaaccattgggcgtttgagcaataagatctctatgatcatctaactgcgtctcgcttcgtgtgccaatcctggttgattgacatggcatcttaaagtgctgccttgagaaagattctgaggcaaagttaaggctacgtggaggaaagtgccacaggagcagagaagggtagcacatgtggggtgttcctgacataatcaagctgtcctttcacaaaggggaagacagcccaaaaaggtggggttttttggtgttttttttttttttttttttttttttttttaagatggagtctgtcgcccaggctagagtcttgttacccagctggagtgtggtggcgcaatcttggctcactgcagcctgtccctcccgggtgcaggcatttctcctgcctcagcctcctgagggactgggattacagatgcccaccacgacacccggctagtttttgtatttttattagagacggggtttcaccatgttgttagccaggctagtctcgaactcctgacctcaagcgatccgcctgccttcatctcccaaagtgctgggattacaggtgttagccaccgcgcccagccccggaaagtttaattaactgatcagagtgacactaccagccaggcagaaaggggacaagactccaggtctgtgactctcaggacagtgctccttccacagggatccagattgcctcatcccacaaacatgtttgctgagcaccagctatttgctgggccagtgaattcggatcattcctggccttcatggagctaggcagtctgaaggggaagactgacttaggggaaatttgattataaagtgtcacaggtgtgggacagacagacagatgtggggccttggaagcattgaggaggggaggtggtgttacagctggttctagaagatgagtgggtaagagctaagataggaactttgttccagccagaggacaaagaaccctgggaggtgagagcaagtgcaagcaggaacattcaggcctgatcttgatggcccagcctgagagaaagcaggagagagggcagggtgggatcggagagagggcagggtgggatcagagaggccttgagtgccactccaccctgaggcgccctttgcctttaattatgctggttcccactggcatttgcgggaaggactcagagcttcagaatagcgtaccatcaccacagttagggaaggttcttcccatccttgtctcctgagctgcataaactgtgtcacactgggtcttagaataaaaattccatgagggcaggaattttaggctgttaaaccagttcttggcacatagtagacattcagtaaatatttgcaagatgaataaaaggcagtattttcccaagatatcatgaggtccttcaagatttttacttgttcattcccgtcttcataatgaactgtcctgcttcctaccaggtcttcaggaaccagctttgcagcaggagccgtgcgtctttccatgcctggtgccatgaaacaggcagggccaagcgtgcctccctttttttttttttttaagacagagtctcagtcttttgcccaggctggagtacggtggcacaagctcagctgactgcaacctccacctcccagactcaagtgattctcgtgccttagcctcctgagtagctggaattacaggtgtgcaccaccacacccagctaattttgtatttttagtagagatggggtttcaccatgttggccaggctggtctcgaattcctggcctcaagtgatccacccacctctgtctcccaaagcgctgggattacaggtgtaagccactacgcccagccctagagtgccttcctttctgtcaatctttattgttttatttttattttgagacagggtctcacaccatcacccaggctggagtgcagtggcacagtcacggctcactgcagccttgacctcctgggctcaggtgatcctcccacttcagccttctgagtagctaggacgataggtgcctgcccccacacccggctaattgttttgttttttttgtagagtcagggtttcactgtgttgcccgggctggtcttgttctctgggactcaagcgatctgtccacctcagcttcccaaagtgctgggattataggcatgagccatcgcacttggcctattgttttattttcattacaaaagtaattcgtgcttctggtaacagatctttaagaaatacagccatatataaatcaaaaagttgcagtcactatatcatttgaatgtttttgaatcaggtaacagaaaacttaacctcagtagcctgaataatatggaaatgtgttatttttaatgctgacaacaccgtgaggtaggtgccctcgcagtcctcatttttctttggaagcaaaagaggctcagcgaggtgaagagccttgccccggggccagtcttggcactcgaattagattttagcactgcttccaaggcccacgctctgtcccctaattctggtgccttcactttgattttggcttccttagcccagagtaaactgccagcccctctcactctccccctcctccttcctgtctgcagctccagaaagcagtggggcctgagatcaccaagacagacctggtccctgccttccagaacctgatgaaagactgtgaggccgaggtgagggccgcagcctcccacaaggtcaaaggttggtgctggcagccggaacacagcaagtggggtgggtatccaaggggctggaggtggaactagcacatcaggtctcacttccctttgcctccctctccctgcccacagagttctgtgaaaacctctcagctgactgtcgggagaatgtgatcatgtcccagatcttgccctgcatcaaggtaacagagagtttgatgggaggaaccaagtggatccgagcctgccaaaaagaggggctggagacaaggctttggggatagtcagctgcaaactaggttcccagccctctgggaccaggcagctcttgggtttcaagcagttaggggtcctgactgcagcttgaggctgaccttaaaggtggaagtactttctagaacctcagatgtcactgagtcctgtcattcacagggttttggggttggagtgggggctgctgagagcaggggtcattgaactcttaagtaggtggtactcataaggaatagtgatttcccctgtaccctaagccatcccctgctctatgaatgagaggggcagaagcaggttattgtctcttaggagttggcatctgcttagccacttgctgctgcaggggttgcactgacccctgtgcctgcctcttctctctcccaggagctggtgtccgatgccaaccaacatgtcaagtctgccctggcctcagtcatcatgggtctctctcccatcttgggcaaagacaacaccatcgagcacctcttgcccctcttcctggctcagctgaaggatgaggtaagggcaccaggatctcagctctgggtttgtggaggggacaggcgggtcttcctagattgctagggtttacctagattgaccaggaatctgctgatatctcaacagacatccagatctttgctgagttgcatgtttgtgggcatagctgtgtgttcatgcgttcattcctccaggcactcttcatgaggcctttcctggacatggaggatatgaaaaatagaaatttaaagtttttatttatggccaggcgcggtggctcacgcctgtaatcccagcactttgggaggctgaggcgggtggatcacctgaggtcaggagttcgagaccagcctggccaacatgatgaaacctcgtgtctgctaaaaatgcaaaaattagccaggcatggtggcgagtgcctgtaatctcagctactcgggcagctaaggcaggagtatcacttgaactcaggaggcagaggttgcaatgagccaagattgcaccactgcactccagcctggacaacagagcaagactctgtctcaaaaaaaaaattatttatttatgttttgagatagggtcttgctctattgcccacactgcagtgcagtgatgtgatcatggtctactgcagcctccaccttccaggctcaagtgatcctcccaccttagcctcccaagtagctgggactacaggcaagagccaccacatctagataattttaaaaaacattttccatagagacaagatattatgttgcccaggttggtcttgaactcctgatctcaagcagtccttttgccttggcctccaaaggcctgggattataggcgtgagccgctgcccccagcctagaataagagttttgatccccaaaagccttcagagactggcagtggagagagacaggcagtcccatgatgccattaaggtgttacaggtgctgttaaggatgagttcatgttttttagggtttaggctaaggtgctctaatatagaccccagaatacattctggcttaaattcggtggtggattttttttctctctctcataacagtctaggacgagattcctcacatgtgcttgcaccccatacacccattggccaggagggtcacgtgaccacacccagcagttcaggttgcctgtattacaaaggatgagaggcggtgctgggtgatgactggagagatcatcagggtgaccactggggaaggagtttggacttgactgtgggcaagcggaagagccagaatagagttggtgttagaaggcaccctgaggcttatgtgaaggaaggattgaagtgaggtggccagcagcagtgtaggcagaccaaaccggaggctgtgggagtctggaaggctgaggctagactaagtggtatgtagagatgaggctgcattgatacggaaggattcaagattgttcaggaggcagaagggaccacgtggtggtttttgccttggtggtgaaaaactgggcagatggtgcaattgtgtgctggtgtgtgacatctttcccaaaagatgggaagtgtgtgaggcttcccaaaagcctcagtctttcttccccatccccttctttcttttttatacacaggcgcccacacagtctgctagaaagttggaggaaatactgtaacagaaagtactgcatcacatttcagtcctccatgcccctaaaagttacgttattcaattctgttacagtggagtaatctcttagccccagaattacagtgaattttttaatacattgaaaagagtgcgctatttttaatatttttttgttctttttgtttttccctattagtgggtgattaactgtactggttttaatcagttaattacgtcagttgctaaaagtctgaatcttcattagtgttcatgacaaattttatgacttaagtaatttatctgagttatgcttcacatgcacatagtttttataattttatagatattaatacaatttatatttgtttttgatgctttaatgggcataatttggcaggtgagagcccctcaagttgtctgctatgtcatttcacacctctccagcgttttggggatcattttgcctctggcatgagggaaggatccaggctcagcccagtttgaaggcaagcccatacgtgctgcaagtgcgctaggactggagcattttttgctccagtttcaccttcagcaagcgctatatggtaatcgtgtgctggcagccagcctgtctcagggcagcttctcttagaagaaaagaaccagcatggttttcttggtgtgaggaattcatctgacttatatttgagatttccattttagatttataaactttatattttacattttgactctcaccagaatttataaacttgtctaaatgaaaaaggctacctttttactggtgcaccaaaaataagtctttttaaatgggtgaggtatagtctctgagccttctcttctcatgcacatgttcagcagcttgaggctcacacagcaagggctggagctgggcaagggccagtcctatcctcggaatgtgcagggtttcaacagcccaagcctgccaggcttgttcacttggttattgattcatttcagtgctcctttatttatttatttttttagactaaaatagttttaataaggaaatagttttcttccttcccttctcccatgttgtggattgatacccagaaaggaacccttgttagcaagcagcggagctaggattagaagaatcatgtctgcctgttttttccagggtgctgtattttcctactgtgattcttaaagtcttttcaaaatggataaacatttcttgtgatactattgtaaggtttaaaaatctgcttaagttagtgatccatgctgcttgctttttgtgtgccgttaatgtgttcccagaacggggagctgggcttggacaggagtagtccctcgggagatgtccataaaagttgatgcagctgagctctttccatcctgtcctgggttgctgtgtgcattgcattctctcagaatccttctttcctctcctcagtgccctgaggtacggctgaacatcatctctaacctggactgtgtgaacgaggtgattggcatccggcagctgtcccagtccctgctccctgccattgtggagctggctgaggacgccaagtggcgggtgcggctggccatcattgagtacatgcccctcctggctggacagctggtgagtgaggaggcctgggggccaggcagtgctgcctcaggggaggtgcagtatgtccagggctgtgatggggaaacggggctttgaaggcttagtggaggctgtgacaactgcctggggagtcgaaggaagggacccaggaaatagggccttaaaagatgcattggattcaataagagagaggagggaaaggagcacctcagacaaagttgagaagtgtccggtctttctagggtgggtgtaggttccatgggatgtggctagcagctccccctgtttgctctcctggaacgcttaccttggaacccttggtttctcctgtagggagtggagttctttgatgagaaacttaactccttgtgcatggcctggcttgtggatcatggtgagtaccttcacaggagcagcaagaggagatgggagctccagaaaggcaggatggattggctggggctgtggcgggcagtggaggaggctagagtcactccccacgccgctggatgctcgtatggaccagctcgcatgcttgttagagtcctagagaagtgttgagtgggaggaggacgaaacagatcacccaggggttgcctggtatagtggagagccagagggccactgagcagccagaccagggttttgaatcctgcccttggggctgtcagatctaaaacaagtcacctgctgtctttgaatgagccccacactcattctttgaaacttcttattctggtgccttggggccattatgagaatggctcattgtttacactaagagaggtaaaaaataaaaggtaatatttatctctgtgaagccctgtttgaagtaataagtgccacataatttaggcaaatcacttcttagagccttagtttgcccatctgtaaaatgaagccagtagtggaacctacctcttggagtggttgaaaagatactgtataaaaaaaaacagttactagatatagcacatagtaagtccttttttctctctttggctcacatgcagcctggcacctaggggctgctttgtaagccatggtgagtgtgacctacattttgcccacatcagttcttcacctccaaatccctgtctctctcaccctcacccttctgcagtatatgccatccgcgaggcagccaccagcaacctgaagaagctagtggaaaagtttgggaaggagtgggcccatgccacaatcatccccaaggtcttggccatgtccggagaccccaactacctgcaccgcatgactacgctcttctgcatcaatgtgagccttccacctgcctgctggcccatccctagggaactggagcgcgtgggagaggagggatgctagagggttccccaagggagacacctggcttgggaatggagacatggagtgcatcttctatccagagatgagtccttggggaactgcaggcaagggggtggggctcccagggtcagggtcatagggcctctgggactggggacttggatggtgagggacccagggcctgggagacttgacctgttggagcagcgatctcaagctttatgagcacccctctccttccctgagaaatgtgtgtctctatctgtggtgcgttgggtgagtgtatgggctctaggtcagacctagttttaaattctggtactgccatatattagctatggaccttggatagttacctaaccgatgctttggtcttctcatttgtaaataattcatactgtaaagaattcatactggtaatcacagcctggtgagcgtgaagattaatcaggttatacacgcacagggcttagaacagttatgctacaggtaggaagtgctcctgtctatttgcttttcctacgattataattatctcatgtactacttatttatgtgtaaaccatacacagggctagaaaggaagggatttaaaaataaatataactaagtgttctgatcatttcttcccacgccactctctggagagcattgctttaaggagggatcctagggcttggtaattaaggtcgatctccagaataattaagggaagcctgaggacagagaaactgggacatggtgttaggatggtgttagtggagttgggagattcactccactaactgagtcacccgtattgctcagcctctgtggggcctgatgatcaccagagtggcctggtcagaggcagcaggaaatgagagttagccaggagctttgcatactcacccctgccactcactggcccccaggtgctgtctgaggtctgtgggcaggacatcaccaccaagcacatgctacccacggttctgcgcatggctggggacccggttgccaatgtccgcttcaatgtggccaagtctctgcagaagatagggcccatcctggacaacaggtgaggtctggatactcccccacacactggcaggggcttcttgtgggcaccttaatctttgacctttgaaggtagagcccagggtcagaggcctggcagcgctccttgcttgctgtgtgaccttggctcccttcccttctcaaggtgtgttttctcaactgtaaaatgaacatcacagcatgaaatagaaagagggggtgatgggttggcagtcctgtatactagcaacaagtcattagaaaatgaaatcaccttatgttttatatgtaagtatgtgtataatttataattgcaccaaaaatatcaaatagccaggaataaattcaatgaaagatgtgtatgtaacacctctaatgtaaactgtaaaacactaatgtgagaaattaaagcagacctgaccaaggtgggcggatcagttgaggtcaggagttcacgaccagcctggccaacatggcgaaaccccgtctctagtaaaaatacaaaaaattagccggtgcggtagcactcacctgtaatcctagctatttgggaggctgaaggcaagagaattgcttgaatccaggaggtggaggttgcagtgagctgagatcatgccactgcactccagcctgggcgatagagcgagactgtctcaaaaaaaattaaagcagacctacataatattcacggatgggacagttccctgaactcatctttagattcagtataagcccaataatcttaacaggttctttagtggaaaattgacacttctaatgaacaaagttgtctgatttacactaccagagacgaagacttatgacaccacaataattaaaatagatgtgaacacaagcatatttaaatcgcccaatagaatggaatcaagggtacagaaacagtcccacatgtgtttaacagtaggcatctctgcagttcagtggagaaatgtatgttttttaaaaaacatagctgagtcaatttgatatccatttaggaataaaagaaggctcgcctcaatgcataaacaaattaatttgagatgacagaccagaaccagaaagattttaaaaataaaggacctagaagaaaatgtaggaaaatatcttcttgagttagcgtaggcacagatttgttaaacagcaaaccagaggaagtgatgggtaagttgaccttctgtaaaatgtaacgctgtttctcaaaagacagcattttgagagtaaaatgcaagccactgactggaggaagatgttttaatatatgtttctgagaaaggactcatccacaatacctgtctacaaatcaggcaagacaagaaagagatggggaaaaagacttgaataggcacttgaaaaaggatctccaaatagccagtaagcatatgacaagggtgttcagcatcattagccttcaggaaaatgcaaattaaatctcagtgacatatgactacacgcctcccagaacagccaacattaaaaaagactcagtggtgcaaatggtgaagacatagaagagctggaactctcatccattgcacgtggggctgtacatttagggtttgatcactctgaaaacgggagtggatctggagtggaatttggtgaagcttgttatacaaacagcctgtgaaacagcccttccactcctgggtctctatccaggagaaatgagtgctgtttctgtcagaagaatgttcatggtagctttattcatagtagccgtaaaaatggaaacaacctccatgtctgtccacagtagagtagataaattttagttcattcaaacagtggaaaactattcagcagtgacgaaacaaatgcctgctataagcagcaacaggtgactctcacagataccatgttgagtgaggagccaaaatcaagaaaacacaccatttatgtcaagttcagaaacaggcagaatgaaggaatcgagatgatggaagtaagaatagtggttatttggggagaacagggaactgtcaactgaaagtgtgggacccacaactgcagatttctctttctgtctgttccaggacacaacctcagctttagtttctctccgaagtccccctccgttttccaaaacaattgactcttggtgcaggcggatttccctgggccccatagatgagagtggatgcctcctctgggctcctggaggaccaggaacttccccttggggccacttaccactcccctcttacgtaccagtttggtctcttcctcctggcccgggtgcctcatggcagaaatcaagagtgatttagctctgtattcactcctaatacattgtaggcctcagtgaatatgtgtgaaatcaatgaaagatacccatttgctgggcctcagagacttgggggttctgagattctgttccactttcccagcctgctctgatctccctgtttggggccccagtccttgtttatcatacttctgacctttaagtaattggttggttggttggttttttgcagtttgtttggttttcctttgaggcagaatctcgctctgtcgcccagactggagtacagtggtgcgatctcggctcactgcaacctctgcctcctgggttcaggcagttcttgtgcctcagcctttcaagtagctgggattacaagtgtgcaccaccatgcttggctaatttttgtactttgagtagagatgggggttttcccatgttgtccaggctggtcttgaactcctggcctcaagtggtctgcccaccttggcgtcccaaagtgctaggattacaggcttgagcccccgtgctcggccttgagtttacctttttttttttttttttttttttgagacggagtttcgctcttgttgcccaggctggagtgcaatgatgcaatcttggctcaccacaacctccgcctcccaggttccagcaattctcctgcctcagcctcccaagtagctgggatcacaggcgtgcaccaccacgccctgctaattttgtgtttttagtagggacagggtttctccatgttggtttggccaggctggtctcaaactcccaacctcagatgatccacccaccttggcctcccaaaatgctgggattacagatgtgagccaccacgtccggcctgattttacttttaattgactcataattttatatatttatgggggtatagtagtgtttcaataatgtgtgcaaatgtgtaatgatcaaattaggataattagcatatctatcaccttaaatgtttactgtttctttgtgatgagaacattcaaaatcttctcttatagctgttttgaaatatgcaaaatgttattattaactatggtcacccgcctgtgcagtgatcagagatttctaattcctgtgtgtgccctggattcttgagactcctcccaccttgggtttggtgtatccgtgtctgtgtacactctcttgcccaagagccctgtgcccacctgttgccccagtccatcctggctcaccctctctctccctgtctcctttcgctttccagcaccttgcagagtgaagtcaagcccatcctagagaagctgacccaggaccaggatgtggacgtcaaatactttgcccaggaggctctgactggtaagacctagaaagcacggagccctagcaggagggtggactttgaggacaggcactgggcctgtgggcagcagcttctgggagggggaggtaccttggcattgtgggcagagagagggctctggttctgattcttgcctgttcctgttttcctagttctgtctctcgcctgatgctggaagaggagcaaacactggcctctggtgtccaccctccaacccccacaagtccctctttggggagacactggggggcctttggctgtcactccctgtgcatggtctgaccccaggccccttcccccagcacggttcctcctctccccagcctgggaagatgtctcactgtccacctcccaacgggctaggggagcacggggttggacaggacagtgaccttgggaggaaggggctactccgcccacgtcagggagagatgtgagcatcccgggtcactggatcctgctgctgtaatgggaacccctcccccatttacttctccacctcccgtcctccccatcattggtttttttttgtgtgtcaactgtgccgtttttattttattccttttattttcccccttttcacagagaaataaaggtctagaagtagttggtcctctggccttagtcatcagcttggaggagggggcaccaccccagagccacaacatctgcgcttttctctggagaagatcttgttacaggacccattatacccctatgtcccgaaagaatactctggggatccccccaggagtgctgctggcctttggggtagagggtccatgaggtgctctgggtggtgtcctgtagtgcagttcagattcatagatgtcggccgagtatttggggggttaagagcaggtgccttggaaccagactgcctgggtccaaattgtggctccttcagttaatagacgtgtgactaggagtagcttgttaagtctttatgagctcagttttgtattgtgtaaaatgagagttacagtaatacctagattgcagggtgggtggcgaggaccaagtgaattagtacctggaaagtgtgtaacagtttcaacatgagaagtacacaacatgagaagcagagttagctgtacattgccagagaaccccctgtgggccatttcctgtgttcttgaagaagacttgggcttggaccctgtccccaggaggtctcagagtaatcaggacggtactagggagagaactgtggcaagatagatcagttatctcggtatctattctccccttcctaatgtagaagctctgatttttaactgggcagatgactacatggattcaaggtattttcctagtgtctcttgaaattaggtgtggtattgtgaccaaattctagccaaaaagatgttgaacagaagtggtatatgcagcttctaggaagtgttcttaagggggaaggcgtcatcccccacctttcctccttcctgcactctggaatgtggaccagatggctggagtaggagctgccacctggggccagaaaatgatcttaggcgtgaaggtcaagtaaggcaggacaagagagaaggagcctgcctccccgaggctgtgaagagccatgccagtactgtcacctgggagaattaaactggtcaagtgcctgttcgtttagggtttcatcacttgaaggtgaccggaattctaactgatggagggaggggcccagagcaccctggagaaaggagcaagggacgtatggctggtggtgtctgcatggaagggtttcacagaggaaatgatgcttgagcacattttgacccaggtggtggaagggaaatgtggctttgagtgacaaggtgatttcaccagctcagccttcatattaccacatccctaccctttgttagactttattgtgccctaggggatgaggctgaaggagaccaaaaagcatctttagaaatttccatttatgccctgggcgataaactctctcccagttgagaactactgctctagaaatgtgaacacacgtgtaaccaaacgtcaaagtctgacattaaactttgactttccccatggttaacgctgctggtccattgtaacaagagtgcagtggaccagcagcctttgcattctcaggagcttgttagaaatgcagagcctctcgtccctgccccgacctgctcaggcagagccttcattttaacaagatgcccaggttcatctgcacactgaagttagagaagtcctgccttaaatactaacccagtttttctctcttgagagtgaggttaatgctacgtgggtctagggctgaggatgtgctatggctcagaggtggggtctacaattggacatgtgtatgtagacaaggctcagggatatgttgaggctgctagattgggcaagtgatggaatgggattattacaggaggtggaggtgcgatggatacccaggatgtgctgggtaatgaggtgatactcagcgaccacaggagtgagtatgagagacgagggtgaaggatagcttgagttattgaacgctggcagagtcctgagttaaccaggagttgcctggtgtcttgggtcatgtgctctagaagcagagcccgagtggagactcgttcaagtgtgttactgagggagtgctctcaggagaacggactgaggtaactcaccttctgtgagcttcatgttggaagaatccaatcaggtgatgaatgtgatgttattaagtccattgttaggagtggttcctaatctcccaggctgcaggctttgtttgctccatacacctggccttctctgtagcagctgaagtttgatgctggagctgggtcagggtggagagactgtgtggagccaggactcatgaccctggcctgtttctcccgctctctaggcctaaatcccagcagtcacactggccatctctaatggttccttccacagcactgttcttcagagcccacacacaaattttgtctccttttgtgatgactgcacttctttggctgtttttgccaacagcctcttcactgaccccttccttccactgcattgacccagacatctggatgtggatgaggtcgagtcacttgttgcctttggctaatgcataggggcacgagtagagctctagaatcaccatgcccttgactcagggtgcagaatctgcctatggtgcttgagctgtggttgtcgctagaggagaattaccatggctcccccgggcagatgaagatgacgaggtggtgcctcagccccgaggagtgaactgcagggcaccgacaagattctgcctgtggccatcagggctggagggaaggaggccaggttcatctacccaagctggtggcatgaggcataaatttaaaaaaattggtgtgggcacagtggctcgcacctgtaatcccagcgctttgggaggccgaggtgggcggatcacctgaggccgggagttcgagaccatcctgaccaattcagtgaaaccctgtctttactaaaaatatgaaaaaattagctgggcgtggtggagggcgcctgtaatcccagctactcaggaggctgaggcgggaggattgcttgaacctgggaggcagaggttgcagtgagcctagattgggccattgcactccagccagggtgacagagcaagaccccatatgaaaaaaaataataattcaggaacttgtcaaaaagagaaaatccaataaagatttagtgccaggccttgactccagcaggccttccccgctctctcgatgtcttgccatacagagctgcaaggtggtggggggttacaggctttgtagggctggatttttcccagtcggcctccaggaagggtaagagactagtagctcgaagtttgggttggctgattgggtccttcccagacttcggaggagggaagggaaacctgaggccccaactcttcatggggaatcactgctctctgtccccaagagcacatgcctttcctgacagaagctgagtagcgggaatctgcttccacccaccccttagcttgggcttaggctcagtccccaccctgctgttcctgtaccctgtgcatattctagagcagtagggagaatgggccttccctgatgctgaaaataagaatgaggggctagaactccaatctcactctctaggcaaatggcagatgtttattattcatgaatactgttgagttaattcaggtctgtgttcctttgctgttactcctcttttttcgtatattttgtacagatactaagcttttattttattttattttttgagacggagttttgctcttgttgcccaggctggagtgcactggcactccacctcccaggttcaagcgattctcctgcctcagcctcacaagtagctgggattacaggcatgcgccaccacgcccgcctaattttctatttttagtagagacggggtttctccgtgttggtcatgctggtctcaaactcccgacctcagatcatccgcccgcctcagcctcccaaaatgctgggattacaggggtgagccaccgcacccagccatttttgtttactttttgagatggagtctcgctctgttgcccaggctggagggcagtggtgcaatctccactcactgtaacctccacctcctgggttgaagcgattctcctgcctcagcctcctgagtagctgttactcttaacatggataaaaatactttaaaaatttttcttttttgggaaactaaaagatatgcgattctcaattgattattcagtctgtggccttctactgaaggagcatacagaatctcacctccaggagcatggagctctcttggataggatcctgctttctgaggccagagcttactctcctatgtgatcagaggctttcacagcatccgcagtggtctccagatcagccctatcatggaggcttggtccagagatcttcatatgaaaagggaaataataagtgtctgggagacacttctgcagggatcctgccctgtctcaataatctcccccatggccacagaaataccctgggattttcccaggagctagccgacacacacagatagattatgaacttcagatagaagccccagcctagccctcactctgatacctgtcatccccaaactgctctgaagtgcttatgtgctggtatctcccaagagtctgcatgtcagtgtgtctgtgctagtgtaatttatttagaaaagtgcaaaggcaaagggcaggatcaacaggcaaagggcaggatcctggaggctggatctagggtcctcttacctgatttatgtcactgattttcccaaatattgataaaaatgaattgatctctaggtggcagagaaacaggaggaaccctagactacatagtaagtagaaaataatgctgcatgtcatttagattgagctcagccctgagtcatgaagtcttcagaacaaaggaatagttctcccttatctgatgctcactgtggccttgggcagcctggcatcgagaattctcagcatgttcactcttgagttctgtgcctgcatcacacagcaatggaacagtcccaaaagattcttaagggtggggaaaggcactaagaaaagatgaacctgcagtccctgttataccatctggtctaattgatactactgttgtcaagcaaaaggagctctctccctgaggcactggaagccaatattttgacaccaggtttttgagaaagaaaagttttttattgtaagttgactcacaagatgagtcaagctcaaatctgtctccctgtgctggttttaaggcagtaatttaattataaaacgtttaggaggtggattctggggttctcaggtgataggtagaaggaaaggagaggtctggaaagtcttcaggcatgcacagttctcttcatgtctcctcatgcatcatgcgcacatttagtgggagtttgaaacatggtgaggaaattcaggctgtgacatcagcatgcttggtctgtgcaaactccatttggccatattggtttcaaccaattttggccagttttgtagagggagtttgagcatttcagaaagttatttcttatctgctgttctgtaaattcataatctttgttagttactggtttatttaactctttgggcatgggttcactaccacctgtgctgaccccacttgatcttttgggcctccttacttcccaccttcattctctcatcatactttatatacactaataactcccctgctattctgtatgtaacccaaatatcagctgtactgcctcatctcttagatatctatgtatactctgacctaatcaaaaccagaaattgtggagtgtgaaatgagaaaagcaatagagaggtaacaacagtattgaacaagaagaaggaagaatttgtgaacttgaagataagttatttgaaaatacatgctcagaggagaagaaagaaaaaagaatataaaaaaataaagtcatcaggatgtacaggacagcatcaaaagagccaagttcacattacaggatttcaagaaagaaaggagaaagaaggctatagaaagcttatttaaagaaatagtagccaaaaatgtctatacctgggaaaagagataaatgtctaggtgtaggaagcttaaaggtctccaattagttttaattcaaataaaacttcagcaagacgtgttgtaataaactgtcaaaaatcaaagacaaaagcacaggggtttttgttttttgttgttttgagccagagtcttgctctgttacccagactggagtgcagtggcaccatcttggctcattgcaacctttgcctcctgggttcaagcgagtctcgtgcctcaggctcccaagtagctgggactacaggtgtgcaccaccgcacctggccaatttttatattttttagtagagacagggtttcaccatgttggccaggctggtcttgaactcctagcctcaagtgatctgcctgccttggcctcccaaagtgctgggattacaggcatgagccaccgcactcggcccaaagacagagttttaaaggcacaaaagaagagagactcatcatttacaatggaactctataaagctatcagcagacttctcagtaaaaactcttagaggccaggaggacagtaggttgatattattacattacagcagaaaaaaaccctggaagctaagaataatttacttagcaatctgtcctttacaaatgaaggacgttgtataaggactttcccatacaaacaaaagctaagcaagtatatcacttctaggcctgtcttacgaaaacgataaagggagtttttttttaatatgaaaaaaaggacattaagtagtaacgtggaaacgtgaaaggatagaactctctgataaaagtaaatgcagaatcaaatttcaggatactctaacactgtaatggaagtatgataatcacttatatattgagtataaagtctaaaaggcaaaactgttaaacataataggcatattaacttgtttagggatatacaatataaaagaagtctaacatcaaaaatataaaatgtgggtggaagaataaaagtgtagtgttttctatgtgatagaagttaactttatcaggttaaaatagccatttataagtaaaatatgttatatgcaagactcatgctaatcatgaagcaaaaaacctatagtaagtattcaaaagataaaaagcaagaaacctaaacataccagttcataaatgcatctaataacaaagacagcaagtgagtaggaagaaacaaagaatctagaaaacaatgaggaaataataaaatgaagagtaaggttttttttgttttttttttttgatacagagtttcactctgtcacccaggctggagtgcagtggtgcaatctcagctcactgtaacctccacttccccagttcaagcaattctgcctcagcctcctgagtagctgggactacaggtgcctgccaccacacccagctaatttttttgtatttttagtagagacggtgtttcaccatattggccaggctggtctcgaactcctgaccttgtgatctgcctgccttggcctcccaaagtgatgagattacaggcatgagccactgcgccccgccaggagtaagttcttaactatcaataattaccttgaatgaggccaggcgctgtggctcaagcctgtaatctgagcactttgggaggccaaggcgggtggatcacctgaggtcaggagttcgagatgagcctggccaacatggtgagaccctgtctctactaaaaataaaaaaaattagctgggcatggtggcgggcacttgtaatcccagctacttgggagggtgaggcagcataatcgcttgaacccaggaggcggaggttgcaagagcaaaactccatcaaataaataaataccttgaatgtaaatggattaagttatttaaagacacagaatatcataataattttttaaaagacccaagtatatgctgtgagaagagactaacttaaccattaagaacacagaaagtgaagaactagaaaaagatattctatgcaaatagaaaccaaaacagagtagaggttgaataaacattaaggaaaaactataatagtacaaaaattgtcattatacaatgataaagaggtgaattcatccagaggatataagaattgtaaatgtagatatgtgcaccatcagagaaccttaatatataaagcaaatattaatctgaagggagagacagattgcaatacaatactagtagggagcttaaatatcttactttccatagtggacagatcattcagacagaaaatcaataaggaatcgttggatgcaaactgcactttagaccaaatgtaccctaacagacatacacagaacattccatgaaacagtagtagagtatcattcttctcaggcatatggaacattctccggacagatcatatagataagacaaagcaaatcttatcaaatttaattgaaattatatcaagtattagttcctactacaatgggacaaaattagaaatcaataacggggaatttcaagatggagggatatgggaaaattaaaccacatgctcccaaacaatgggtcaaaaaagaaatcacaagagagattttaaagtatcttgagacaaacagaaatagaaacacaacatactaaatcttgtggaaagcagcaagagcagttctaagggggaagatcagagcaataaatgcctacaacaacaacaaaggtctctgaaacctaacattacaccctaaggaactagaaaaagacaagcaaactaaactcaaagtcagtaaaaagaaggaagtaataaagatccagtgtaatcagaaaaaaatgagagagcagaaaaacacaattgagaagatccttgaaactaagtttgcttttctgaaaagataaatcacaaacctttagccaaacaaaccaagaaaaaagaagagtcaatcagacatggaagatgagacattacacttaataccacagaaatacaaaaggtcataagacaacattatccacaactatatgcccacaagttagacaatctaaaagaagtagagaaattcctagaaagataaaacctgctaagactgaatcatgaggaaatagaaagtatctttcattaatgcagaattgaggaaaacaaattaggccaggtgccagtggctcacccctgtaatcccaccaccttgggaggctgaggcaggcagatcacttgaggtgaggagttttgagaccaacctggccaacatggcgaaaccgtgtctttactaaaaatacaaaaattagctgggtgtggtggtgcatgcttgtaatcccagctacttgagaggctgaggcacaagaatcactttaaccggggaggtggaggttgcagtgagcctagatcgcaccactgtacttcagcttgggcaacagagggagacttttatctcaaataaataaaattaagaaaaacgaaaacgaattaaaaatctgaactgaccaagaatgagaaacgagattcaatcagtaataaaacacttgcatcaaagtaaagcccaggacatgatgtgttctttgcagcattctaccaaacattaagaaaagagtaatgccaatcattctcaaattccttcaaaatatttaagagtagaaaacatttccattctcttttttgaggccagcattaccctgatgccaaagctacacacaaggataatacaagaaaaagctacaggtcaacattccctatgaacttagatacaaaaatcctcaacagaatactagcaaaaaaaaaaaaaaaaaattggcctgcacggtggcttcatgcctgtaatcccagcattttgggaggctgaagtgggtggattacctgaagtcaggagttcgagaccagcctggccaacatggtgaaaccgtgtctctactaaaaatacaaaaattagctgggcatggtggcaggtgcctgtattcccagctactcaggaggctgaggcaggagaatcacttgaacccaggaggtgaagcctgggtggcagagtgagactccatctcaaaaaaaaaaaaaaaagcaacacattaaaggattatttaccataatgaagtggtaggttatccctggatgaaggatgggtcaacctatgcaaatcggtgaatgtgatgcaccacatacaaagaatgaaaacataatccatatgagcatctcaacagattcactgaatgcattggacaaaattcaacattcttccatgataaaaactctcatcaaattaggtatagaaggaatgtacctcagcacaacaaacgccacatatgaccaacccacagctaatactatgcccaaagatgaacagttgaaagccttgcctctatgatcaggaacaagacaaggaagcacactctcaccacttatatttaacatagtggtgaacgttcttgccagagcaatcaggcaagaaaaagtaatataaagcattcaaataaaaaagaaaagtgaaattatgcttgtttagtaatgatcttatacacagaaaactcaagactaaacaaaaatactgttagaaataatgtgataataaatgaactttaaaaagtttgaagataagaaattggtgagcaaaattagttgcatttttatatactaacaattaactctctgcaaaagaaatcaaaacaatcttttttcaataaccagcaaaacaataaaatacatagaagtgattttgtctgaagaggtgaataacctgtaaacagaaaattataaaatgttgataaaacactgaagaatatacaaaaaaaatgaaaagatatgtcgtggttgggaattggaagcattaatagtgttaaaatgtccgtactaaccaaagcaatctgcagattcagtgcaacccctatcaaaattctaatggcattattcacagtaatagaaaaaacaatcttgaaattcatatgaaacccaaaaccccccaaattttccaaagtaatcttgggtaaaggaaacaaagctggaggtataacactacctgatttcaacatctactatgaagctatactaatcaaaacatatgacactggcatgaaaacagacagatggaccaatgggatggaatagagagctcagcaataagcccatgcattcatggtcagctgacttcaacaatagtgccaagaacacatgatgtggaaggatgcatttggatatctacatagaaaaacaataaaattggggttttctaatccgatttttattcaaatattgcctcaaaatgcgttaacaacttaaacataaggtctgaaactataaaactactagaataattcataggagaagagctacatcatatttgtccaagcaatgatttttggatatgaccccaaaagcacagtcaatgaaagcaaaaatagacaattgggattatatccaaaacttctgtacagcaaaaagttggggtgctggtggtgaagaaattttgattaattagtacaacgatatggttagaatgaataagctctactgttagcacagtagagattattgttaacaataatttattgtacatttcaaaatagctaagagacgatctaaaatgttctcaacgcaaagaaatgataagcatttaatgtgatgggtatcctaaattccctgattagttcattttttgcttcagtaaatgggatcttgctctgccacccagtggcgatcatggctcactgcagccttgaactcggctcaagggattttttccacctcagcctcctgaagtgctcagattacaggcataagccactttgctcagccaaaaggggccaaagggtggatcactgaaaggtgttatgtgaaaaattttgtgctgctacccaaatctaaatgttgaagtgccccgaatctccagtaccttagaatgtgttttgagatagaaccctttaagggcgattaaattaaaatgagggtgttagagtggggtccaatcaatctgactgatgttcttatagaaagggaaaatatggacacagagagagacaccagagtgtcgtgcacataaagactttgaggacacttcataatggcgaccatctgcatgccaaggagaaaacagcaagcctgccttcacctcaatcttgaacttccagtctccacaacactaagaaaattaatatctgttgtttgtgctacctagtcaatggcattttgttatggcagcctgagcagattaacacacaaggcaagaatctgccttttctttctttctttctttctttttttttttttttgagacagactctcgctgtgtcacccaggctggagtacagtggcacaatctcggctcactgcaacctctgcctcctgggttcaagtgattgtcctgcgtcagcctcccgagtagctgggattacaggcacccgccaccacacctggctatttgtatttttaatagagacagggctttgccatgttgctgaggctggtctcgaacccctgacctcaagtgatccacctgcctcagcctcctgaagtcctgggattacaggtgtgagccaatgcacccagcagaatctcccatttcaatgctgacacctctatgagtttctaataatctctcctcatgagttccaggttgccagtctctgaggatgtcagttcttacagcttgagcctctcagaaaggagaggtttcacagggaggtataaagaaagcagaatctgggcgtacatctcccattattattgtttgcccattttcaggaattaaaggataacaaagtcaccaaggggtcttctccattagagggaaactgctgagatgtagtgtgaagagtactgattggttttagacgcagaacttcctgttgctgtctttggacaaatcgttaacttttctaagtctgaatcctccagtgatatagcagttgccagcattcctcgcagggatattgtgagtctcacagggcattctgcacgtgaaaggaggtggtaaatataaatcactgcacatgtgtgaggcttcatattatagtcatagatgttttggatcttgcttcctgatttctgatgctcacagaatctaaaattacaggatttaaccaaagagggcatttttctcaaccttctgtaaaatccctttgttcttaattttcaccacatcagaagcagacttctatcttctagctctgacattattcagtgcatgggtcttaatttagaaaagtaactgagtgatgacacagagaggccaatgggatttttaaaggaaaggcagggcagagcagggtgcacagttcaggattggccagattgaggcattcctgagggccttggggaaaggggctgttcctagttgtctggtacctggctttgtgttgacttaggagagcagaatattggcttggtgtgtgagagtttgacatggagagggttggggcatgggctctgggtgggtaaattttaataggaaaggctggctccaggaaacccacttctacatctaagaatgtgctagccccaagatgggcagtctctacccagtcagggaagacacagtcacagcaccaaagaacacagaaaataaggaaatataataaatataattggccctgtgatggacaggtgccaaacagacaaatacagaatctaaagaaatggaattaaaacagagtttgtcacaaaaagaaagagaaatcctggggattttttttcaaaacaacttcacttctagtctttttttttttttttttttagatgaagtcttgctcttgttccccaggctggagtgcaatggtgtgatctcggttcactgcaacctccgcctcccgggttcaagcgattctcctgcctcagcctcccgattacaggtgcctgccaccatgcccagctaatttttgtatttttaggagagacggggtttcaccactttggccaggctggtcttgaactcctgacctcaggtgatctgcccgcctcggcctcccaaagtgctgggattacaggcgtgagccaccacacccagcccacttctattttttaaatttctatttctaaactagtctttgcaatttcagtctccagtgaagtctcgggttgacattacaggaagagggggagaacctatagggaagagaagggtctcagaggtggctatttggatgtaggactcataactgcctctgttcaaggtaggagaaaatgctgtagtgggtttcttcctctattgactctcctctatcttagcagtgcttgtggaaaccctagtttcttccttgggattcagccaatgaatgtcttactagcttgagtttcagcgactctagagttcatgtagaaagctctaatactacatgaatttagatattgtctgaggataaaactgatttgccttttttgcagggcaattttcagttattcttttgttcctgggttgaagaaactgatgcatatgtgtcttggagtttaacttttttttttttttgagacagagtctcactctgttgccgggcacagtggctcaccctgtaatcccagcactttgggaggctgaggcaggcggatcacgaggtcaggagttcaagaccagcttggccaacatagtgaaaacccgtctctactaaaaatacaaaaattagccaggcatggtggcgcatgcctgtagtcccagctactggggaggctgaggcaggagaattgcttgaacccgggaggtggaggttgtggtgagatgagatcgtgccactgcactccagcctgggcaacagagcgagactccatatcaaaacaaacaaacaaacaacaaaaaccataatcataaagatatattcacaaaaaattcttatggaatataggagccaaatatgaaataatttatgctgatttcatttatatcaagtagcaaacagacaaatgtgatttaatctcttaaatactggaataaatgtaaaccagtatcttgacagcaacacttctacaaatagttccaacagaacgacagccttgaggatagtgacttagcacagaggaacttctggtgaactggcagtattgtttcctcatccatgtgctgcataaagagttatgttcttttgtgaaattccagggaactgtgatttataacctataataagtctttgacttaatcaaaatacatatcactggaagccattatcctcagcaaactaacacaggaacagaaaaccaaacaccacatgttctcagttataaatgggagctgaacaatgagaacacatggacacagggagaggaacaacacacactggaacctgtcgaagaggtggaggggaggtagagcatcaggataaatagctaatgcatgcagggcttaatacctaggtgatgggttgataggtgcaacgaacaaccacggcacacatttgcctatgtaacaaacctgcacatccagcacatttatcctggaacttaaaatttaattttaaaaaaactattaaaaaaataaaaaataataatacatatcaccgaaaagagttaaaagaagttcagggtggggatattggtgctaagaatgtgtgtgagcttccacttgtgtctgtaccagataaaatttatgaagacgcaggcacaggttaacagccacagcaagaaacataagagaataataccaatgctatatatgctgattctttgatttttgtcctgaatacagaagaaaactatcctatcttgttttgtttgtaatgtttctgctgctgtttggcaatcacacgcatagggtaaaaccatatttatcagcatattcaaggtccagtagaggaaaatagaaagctccatatacttaggatagtttatgttaaattctatacatctggagttcctggggctcatcatgatggcttgaaacactgcaggcacaggtggtgccaacggtcacaccctaccaactctgtgaggatagcaaatcagaatccaaaatcatgaaggaaattattcaatataaaatctgacattgatttggtgctgcatacagaggtgtgtcttggggatacccttaaacagaatgcgtaagaagtggctataatcaggtgcttccaattcaaatctgtggtcctcaacctgcatcctgttaagtaaaagaagacataatagtaaagaagacagaaactcttcaggattccaacaaaattctacgacaagtagatcattcctattgccaactccctggaggccattctgcgagttcccagtgactgatattcatctttagagccagaagatcctgcagagaacatgaagtgtaggtgaggtgatattatccattaataatatcaatggaaaaacccgtattctactgagaaacatttaaagttttgttttgcaaagaggctttctagggttgaatgtataacatttaaagagcacttacgatatgggaatcactgctgtaatgtgatatgtataccttctttgatttttgtaactgtatgatggattcactggcatacttttccttgtagagacaaaaggaacttaagatacagagaggtgcagtgatttgtggaaattcacaagctgcttaggagctgagaggagacttgcacctgactagggtgtctgcaaaggtgattgctaaggcctgtgctatcctaacagaccattcagctgtgttttcaaaaaatctggacctagttagttttgtttgtttaccatgccattttattttccatctctggtattttattttataattttgttcaaaacaagtttccattcctgtgtaaagaattactgcataagtcaatatccaatgtcagtaacctttgaaatcccaatacactgttggtgcactatttagagtataatcctgaaggaaacttcccctggtacaagttggatttactgaatgcaagaatggctcaatattactttggtagcagaaaaactcattaactcatccaataggaggagaaaatactacagcatttatcaatgaaattattgaagtatattactctgtttctagactgttaaacatgaaatactaacaggtaataaaacaatatagatagaaactcaattattggtaatttttgatcagtcagaaatcaatatgttaatgtacaagttatgtgaaactattagcagggtagtgtaatttgtaaaatacattaaaacagaagaaatatctgcaaaatggaatctggagaacacaaaatcttgagcattatggatgttgaaatcatagtaaagtgaacttttacaactcaatagcaaaaaataactcctaaaacaagaaagtaatagatcaattttaaaatgggttaaaggcttgaatagcattactccaaagaagacattcaaatgcccaacaggtgtataaaaacatgctccatgtcattgattctgcagaaaatacaagtcgaaaccagagtgaagcatcacttcacacctcttataattactattagcaaaaacccaaaacagcaagtgtggcaaagaggcagagaaattgtaactcttatacgctgtggctgaaaatgcaaaatggtgctgtctatatggaaaatgatacagatgttcctcagaaaaattaaaatgaagccagatgtggtgcacgcctgcagacctgcagttactcagggaaactctgtctctaaaataaaataaaataataaaataaaatagtgacaattaccatatgatccagccttcccacttctgagtatatagcaaaataactgaaatcaggacctcagagatatcagaacttccatggtcattgcagcaccgctcacaatagcttggatgtggaaacgacctaactatccattgaatgatgaatggacgaaaaaaatgggatgtgtgaatatacagtggaacattattcagcctttagaaagaaggaaattctgcaagagatgacgacatggataaatcttaaggacgttatgctaagtaagtaaggcggtcagtgaaggacaaatactgcatgattcacttgtgtgtgtaatctgaaatagcctcatagaatgagagagtaggataggccgggcaccgtggctcatgcctgtaatcccagcactttgggaggtcgaggtcggtggatcacctgaggtcaggagttcgaaaccagcctggccaacgtgatggaaccctgtctctactaaaaaaagtgcaaaaattagccaggcatggtggcatacatctgtaatcctagctactcgggaggctgaggcaggagaatagcttgaacccgggaggcggaggttgcagtgagccaaaatcacacactccatctggggcaaaaagagcaaaactatctcaaaaaaaaaaaaaattaaagagttatgcagaatatttttgaccaggaaaaataacacaagatacagttgatcctgactactgctgtttgcaactcttaatagtaaagttacccttcccttaaatgctacttccctaacctcaagagggaaagcagcctcaccataatcctaagagcacagaggttttccgtggaggacaatcactgtctccattaagcgcatcatttatacagagttagatttcttaaaaaacaattttattctggaaatgatttcagatatatggtttctgcacaggataaggtaatttttctagctctatcctactcttcattataatcatggaggcagtataagcatattattaaaaatactgtaaatgtactgtgtgattcttatgaggtgtgtgaacaacatatatatttatttactacaatccttgagcaccataaatcttatttaattattactggaattattcaccaactctcatcctaagtgaagattttattaagttaccttcgttttgtttggtttctgagatggagtctagtattgtcacccaggctggactgcagaggtgtgatctcagctcactgcaacctccgtctcccgggttcaagtgattctcctatctcagcctcccaagtagctgggattacaggcgccagccatcacacccagctaatttttgtatttttagtagagatggggtttcgccatgttggtcaggctggtctcaaactcctgaactcgagtgatgtgcccgcctcagcctcccaaagtgttgggattacaggtgtgagccaccgtgctcgtccggattttattatgatagctttgtatccatcagggattggtataaggtttaggcctctcatctctctttattgactcagcccataagagagtaattattcctcctccctgtctggctttgctactgactttgtttctacaaaagagaaatccctttccagacatgaccacttggacttcttttcttgcagattctgcctgccagactgaaacacaaaaatactcacctgattccttcccactgccaggacagcccagtttgtgtgacggtcataacagcactgtgtgggaaggaggcagccagaccctgagataaaggtttgtgagtctgtgacctcatcttccctcagaagtgcaattataattttacctgtagcagcaatgacagctgacttagggagttgataactttttgaaaaactttttgcagttgctaattaccagaggcaattacaactttctcataaatgtctccaaagagaccactgaagtatccaaaagaggctcttactttttcacaatccctgaagactgcaaggagcagaaaatattgaggtttgatctgtgaggcacttgtagagaagcatgtttgtctcactggatttcctaattctatgagatactcttcttcctaaaatcaagctcatccttaatttgcagatccattatgtaagtattcagcaggtaactggaatcagataaaggatctagaatggattaataaaaaatgagataaatgtgagagaaaagcatggagtaatttgcattagaaatcgctggactcatttgtataattaaatgtaaattaatttagaaatgataatatggacacgttctaggaaatatactttactattgtgacctcagcagtgacagaaaaagtctggacataaaaatattctaaagagaaagatgtgaaaaaaaaaaagtctctcacaaataaaacacaaggatcacatgatttaacagccaaattctaccattctttttttttttttttttgagttgaagtcttcctctgttgcccaagctggagtgcagtggcgcaatctcggctcactgccacctccacctccccggttcaagcaattcccctgccttagcctctcaagtagctaggattacaggtgcatgccaccacacctggctaatttttttatatttttagtacagatggggtttcaccatgttggccagactggtcttgaacttctgacctcaggtgatccgcccacctcagcttcccaaagtgctgggattgcaggcgtgagccaccatgcccagccattcttttaattattagataaacctaggctatcttctcaattgaacagcagtagataggaaatttctctacatttaccattcctgaatttttagtaaaaagcactaaccagttatgccattaatttggaagtttaaaatagaagagccgaaaatgaaactttggtttcccaacacacaaatccacaatttgacctaagtccactctccattctcctaggagacatttgaggtaaactgagaagttacaggaaacatagtccacacaagaccacactcacttcagatgcccactgcaatttcagtgcttccccaaatcaccctaaagttggacaattcactggaagaactcatggaactccctgaaagctgccatgctcacagttacagtttattacatgaaaaagatccagggtagcatcagccaagggaagaagcagtcagggcagagtccaggataagcaccacatttggagcttccatttgtcttctccctgcagagtcataggtgaattcctttccaggaaccaatacacgacaacacctatgggatattgccaaccagggaagctcattcaagccctagtgcccagagttttactgaggtgtgatcacatactctccatagctgaccattagtttccagcccctcccagtgtccagccttatatatagatttacagttcctccagagttcagaattgatatggtatatccaaagccctaataaaaaatcaaaacgtatggccaggcgcggtggctcatgcctgtaaccccaacactttgggaggccgaggtgggtggatcacgaggtcaagagatcgagaccatcctggccaacatggtgaaaccccatctctcctaaaaatacaaaaattagctgggcatggtggcgcatgcctgtagtcccagctactcaggaggctgaagcaagagaatcgcttgaacctggaaggcggaggttgcagtgagccgaaattgcaccactgcactctatctcagaaaaaaaaaaaacaaacaaacttagtgttcaggaaacaagtctgaaagtaaacggagatactcctactagacatggcattttaagagcacggacaccactccctaagcacttgggggttacaggatgcagtgtgtttaaagggctctgctgggtttcagtgtagcatgagacagagtgtgcaaggaagttaagggaactgcacacattctgctctgagggactacggggtgcagtggttatggggataaaagggataatggagaggggacactaggcagaaatgagggatgggcaggggtgggtaaaacaaccaggaaggtttatgtccatcagggttaaagacacaaggagagaaagcatatatgtgggataagatttaaatatttttttcaaagaaagacacaagacagtgacacttggaaagaagaaaggcagaattctgttagttacagcttcaaaggacagaaaaatgtcaaaagagccacgcagggcgttgcaccaagggctaagtaacagcacgctggagcagtaggggggcttatgatgagtgtcggagctggaggctgagctagtgttacatgacgccttgtgagttggctatgttgaattatttcatggactctgggccaaagcagctgtccctggtaagctggtacatagctctatggggattagggtacatcgtggctttagggtgtggacacaatcagctgctcaataaggggaactagccaaccctagccagtaactcacatctgtgtcaagacaggattacaaataaaaggaaaaaaatctgctttaaaatctaataatgggatatggatgtcctcagagtagttaatattccaagacagagacagaggccaggagggggagctccagcctaacaggggagataagtaacacggtgatatgatgaataagatgctaagggctgggcgcggtggctcacgactgtaatccctgcattttgggaggcggaggcgagcagatcacctgaggtcaggagttcaagaccagcctgaccaacatggagaaaccctgtctctactaaaaatacaaaattagccgggcgtggtggcgcatgcctgtaatcccagcactttgggaggccgaggcaggtggatcacgtggtcagaagtttgagaccagcctggccaatatggtgaaaccccatctctactaaaactacaaaaattagcagggcatggggtgggcgcctgtactcccaacaactccagaggctgaggcaggagaatcgcttgaacccgggaggtggaggttgcagtgagcagagattgtgccactgtactccagactgggcgatagagcaagactcggtctcaaaaaaaaaaaaaaaaagaaaagaaaaaagaaagaaaaaagaaaatgtagaaggtttgggtggatgggggtggggcaggtgtcagtaaaggggttatagaaggatgggacagagagaagattaggggatgaataagccctaaacggcagtgggatgatggtcaaggtatggatagtggtggatgggattacatcttcaaagtctttatttctataaaggtcgtgtgctgaggtactgggggttaagatttcaacatgaattgggtgggggaacacaattcaacccatagcagaaagtgcatgttgatgccataaaaggcatattctcaaaatgtagatgagatatttcaagataatgagaagggggcttagaggagaagagaagaaaatccttctttcctaggccaatgtggagtaccaggtgagatgctgtgtcctctcttcctcaggaaatgccatgtctttagaatttgaagctctttactgatttctgcttctgagatactgagcctagaatagaatatgttagttgtgtgtacgatattgagcctagaacattatatgttagttgtgtgtgtgtgtgtgtgtgtgtgtgtgtgtgtgcgtgtgtgtagacagagagcaacttcagatccaatttcagattgaatatgtattcaatcctcagagggagaatacaccttaataccaaaaattgttccttctggagatccaaatagtatcagtcatggattattaatgaacaatttgcctttaatttattatttaaatattttcccattaaatttgtatctatgtatattcctttttttttttttttttttttttgagatagagtctccctctgtcacccaggctggagtgcagtggcatgatctcggctcactgcaatctctgcctcctgggttcaagggattctcctgcctcagcttcctgagtagctggtattgcaggcgcaccaccatgcctggataattttggttgtatttttagtagaggtggggtttcaccatattgaccaggctggtctcgaattcctgacctcaggtgatccgcctgcctcagcctcccaaagtgctgggataacaggcatgagccaccgtgcctggcctagtactatttttacatagtatatactatgtgttatcatacgtaaatatcctgaagttcattaagataagcatgcacatcgcattcttgatattatataatacatattatattaattcattatgacagttcattttatgtgtctgcttgactaggccaaggaatgtgcagatggaacatcatttctgagggcgtctgtgaggatgattccagatgagataagcattcaaatcgatgttctcagctgagaggattgccctccctagtgtccctgggcatcatccaatcagttgaaggcttggatagaacaaaaggtagaggaaagaagaatttacctctttttcctcctgccttcctgcttgagctgggacattgatcttttcctcctttggtctaggactggcaccacggacttcctggttctcaggcctttgggctcaaactggaattacaacactggcttttgttggtctccaccttgcagatggcagattgtgagacttctccataatctcatgagccaattcctcataataatatttttcatatatctatgtacacacacacaactactgtttctgtttctctggagaaccctatgtgtgcaattatgcacacattttttgtctcctatgcatattctttatttttctttaagagatggggtcttactttgtcaccccaggctgaagcacaaaagtgtgatcatagcccactgcagcctccacctcctgggctcaagtgattctcctacctcaacctcctgagtagctggggctacaggtgcatgccgctgggcctcactgatttaaatttttttttcttgtagagaggggtctccctgtgttgcccaggctggtcttgaactcctgggctcaagtgatccacccacttcagcctcccaaagtgctgggattacaggcttgagccacagcacccagcctcttatgaatagtctttttttttttaaacttttattttaggttcgggggtaaatatggaggtttgttacataggtaaacttgtataatgggggtttgttatacagattatttcatcacttaggtactaagcatagtacctgatcagtatttttttctggtcctctccctcctcccagcctccatcctcaagtaagctccggtgtctgttgttcattcccctccatctgtccatgtgttctcatcatttagctcccacttataagtgagaatatgtggtatttgattttctcttcctgcattagtttgctaaagataatggcctccagctccatccatgtccctgcaaaggacatgatctcattcttttttgtggctgcatagtattccatggtgtatatgtaccacattttctttatccagtaccattgatgggcatttaggttgattccatgtctgttattgtgagtagtgctgcaatgagtatataggtgtgtgtgtctttatgggagaatgatttatatttctttgggtagatactcagttatggggttgctaggtcaaatggtagttctgtttttagctctttgaggaattgccacactgctttccacaatggctggactaatttacactctcactaagtgtataagtgctcccttttctccacaacctcaccagcatctgttatttttttgactttttagtaagagccatctgactggtgtgatgattgtggctttgatttgcatttctctaatgatcagtgatattgagctttttttcatatgatcattggctgtatgtatgtctgcttttacatgtatgtcatcttttacagctaattaatgagtgcaggaatgttgcaaggtgcaaagtcaacataaaaattagttgcatttgtacatactaacaatacactgtctgcaaaggaaataaacaatctcattacagtagcaccaaaaatacttgaaaatgaatttaaacacgtgggtgaaatatctgcacccttaaaactataagacattgatggaagaaattggagaagacataagtaaatgaaaatacatcccatgttaatggatttgcagattcagtatttctaaaaggtctatagtataatgagtgatctacagattcagttcaattcctataaaaatatcgatcgtatttatcacactaatgaataaccaatcctaagattcatatggcaacagaaaaagaactttctactgagaaatcacaagacctacaaattcagatgggagaaatcatttcttataaagggttacaggctacaaggtggccattctgacagactgggaagtgtaaattccagtagagctcccagtggaaaagaaatttatgctgaacgagttggccaagtatacatattcaacaggtaacaggatgagctatgactattcatgcacggggccccaacgcatgcattttgaacaaacatgcatgctacctgtgtctcatgctaaccttgagatggaggttgaacatttaaatgtattgcaattaggccctacaagtcaaaaggtgaaggtgctctgtgtgcagcctctgtaaaacccaccagaagcagtccatggttggtggtctcttatcaggagaatgttaccaaaatcagtctcttgtccaatcaaagctatagttatggcttgtggaacacggggctctgggtcagtatctggtgatggatatactgcaattgttttaatattgcttgttttgaggccaatgcactttatttttgctgctagagaaaaagaacaaccgtatggcagttagaacatagtttattctttaagtgtaggggtgtgtgacttaacccttgcctggtgtggctttaggtcttgttcataatttggtatctcattgccccaaagaatccattctgttggtcttgtgatctcgatttatttatttatttatttatttatttttgagatggagtcttgctctgttgcccaggctggagtgtagtggcttgatctcggctcactgcaacctctgcctcccgggttcaagcgattctcctacttcagcctcctaagtagctgggactacaggcgtgcgccaccacacctaatttttgtatttttagtagagatgggggtttcactatgttgcccaggctggtctcaaattcctgaccttgtgatccacccgcctcggcctccccaagtgctgggattacaggtgtgagccactgggcctagccatgatttctattttaacattaatgttggtcagttgttgtgtttacgccacaaaaggagggtataacgaaatatctaacctcccatcctgtcttggcctgaactcagtttttgttgttgttgttgttgttttctgtttttcttgagacggagtctcactctgtcgcccaggctggaatgtaggggtgcgatctcggctcactgcaacctctgcctcccgggttcaagtgattctcctacttcagcctcctgagttagctgggattacaggcgtgcaccaccacgcctggctaattttttgtatttttagtagagatagggtttcaccgtgttggtcaggctggtctcgaactcctgacctcgtgatccaacctcccaaagtgctgggattacaggcgtgagccactgtgcccagcctagaactcagtttttaaggttcctctggggtccccttggccacaggtggttggagcgcttaggattttatttttagctctcagaacccaaatagccaaagcaatcttgatcaagaagaacaaggctggacaacaatcccaccacggctcaggaaagcagccagggcagatggactctaagtgagtttcacttgcactgaaggcttaaggaaggacctagagagcaagctaccctgggtttcataccctggggtcacatgaacaatgggctaaagcattgaaggatatccagtgtctagcaaagactgaaacagaacccaggctgttccagccagcccctccctatctcaggaagctccatttccagaacactctacagttattcttgagaactatagcaagaaagggaggagaactgggtcagtccatgatcacttgaagaactatccattggttacttctgtgattatgttatgttacatggtaaaagggattttgcgattgtaatgaaggttactgcccagctatttatttatttatttatttatttatagagacggagtcttgctctgttgccaggctggagtgttatggcgccatcttggctcactgcaacctctgactccctggttcaagcaattctcctgcctcagcctcctgagtagctgggattacaggcacatcccactacgcctggctaatttttgtatttttagtagatctggagtttcaccatgttggccaggatggtctcaatctcctgacctcaagatctgcccgcctcggcctcccaaagtgctgggattacaggcgtgagccaccatgcccggcctgcccagctgtttttaagacaggaagatagccctggattatctggtagacccagtgtcagtcccaattacatgagcccttaaagagggagaataagacagagagatgcagcagaagaggaagtcagagataagcaacatcagaggggtggtatacattattgctggtattgaatatggtatggatatacctgcacaaagaaactctcagaagtaaataaatttttgccaacaatctaaaagatcttgaaagtggattgtttgtctcccagtgtctcgagatgagagcccaggctggctgatccttgatccagcctttttacaccctgatcagtgtatccggccaggccttgagatttctgatccaaaaacagcaaaacaataaatgggtgtcatattaagttgctatgtttgtggtaagttacattcttcctataaaacaaatttaatgctaaaatatttaaataataaaaataaagatacattgttcattaataccatgactgatactgtttggatctccaaaaatagctattttcttttcctttgagacagagtctgcctctgtcacccaggctggaatgcagtggcaccatctcggctcactgcaacctccgcctcccaggttcaagcgattctcatgcctcagcctcttgaagtttctcactgtctacacacacacacacacacacacacacacacacacccataacataatctgttctaggctcagtatctcaaaaacagaaaggtaaatatcttcaaattataaagacatatcatttcgtgaggaagagaggacacagcatctcccctgggactccacattggcctgagaaagaaggattttcttctctttccttctaagcctctttctcagtatcttgaaaaatcacagttgcattttgagaacaagcctttttaaaaaaatgttatcaacctgcatcttctgctgtgggttgaattgtgtctccccaaaattcgtatattgaaatcttaggacaggcatggtggctcatgcctgtaatcccagcactttgggaggccgaggtgggtggatcacctgaggtcaggagttctagactagcctggccaacatggtaaaaccccgtctctactaaaaatacaaaaattagctgggcatagtggtgtgcgcctgtaatcccagctactagggaggctgaggcaggagaatcacttgaacccaggaggcggaggtggcagtgagccgagattgtgccactgcaatgcaacctgggtgacagagcaagggaaagaagaaagagagagagggagaaggaaggaagggagggagggagggagggaaagaaggaaggaaggaaagagaaagaaagaaggaaagaaagaaaggaagaaagaacgaaagaaagaaagaaaagaaagaaagaaaagagaaggaaagaaatcttaacccccagtacctcagcatgtggccttatttggaaatagggtctttgcagatgtatctccatcccccaatctccataatgcttctttgtccacctgaataacccccccttgatgtccaccccactgccttttaggtctttattcgtcccctagtcctctccttgtcccatcactctccaacccatttgtctatatctgttcccctgccccctcatccatccaaaccttctagatattcttaccccacctaaattcaacaccaatttggattccttcctctgtcaactttatgccctgcacaattacggggatctcagcccaacagtcccccacccttttaggaccgtcacacccttcctcttgacttctagtttctcccattcttgtgcccatggctcaatttccacattctccatgtcttctcccttgaaatcccagatctcaatcataggttgccatcagctccctctgtccctcacccttcagcatcctcaagtccaccatcctcaccaccttattaatcaccagaaatcatttcgtctccccgtgtccattatctctcctgcaaggcttgagctccccctcctggcctctgtctctctcttggaatattaacaacccccaggacatctgcactccaccgtaagaccttttttttttttttttttttttttttttgagacagagtctcgctctattgccaggctggagtgcagtggtgcaattttggctcaccacaatctccgcctcccgggttcaagccattctcatgcctcagcctcccgagtagctaggattgcaggcatgtgccaccatgcccatctaatttttatatttttcacagtgatggggttttgtgatgctgcccaggctggtctcaaactcctgacttcaggtgatctgcctgcctcagcctcccaaagtgctgggattacaggtgtgagccaccgtgcccgaccagattttacagtatcctttttggttaatgctgccttgactcagatttgagatactggctagagttggccagttcccctaattgagtagctgtttaagtctacacccccaggccactatgtacccattttaatcctctcagggctatgtaccatgtaacctgccacgatccctggtggactgaacaaaaggggcaaacgcaggaataaaagacaaagagagtatatttggaaaagggggaaacttgcctctagtggaaaaggctctgagctttttcagccctccaaatttattaggtaaaagagataacgagaaagagaggatgattattgggtaattgtcagtcggcaattttggttcacagcaggcttgagagactgcatccttcaaaccataggtgctagatttcccagtagataacttcaaggagcccggcaccagggagtgatggccctcagcaaacctcctggtggcaggtgcagtcatgagttttctcacgtcctgtaatcatgataaacactttgctgtttgatcatatagcctccagtggaatgctgagttggtcacaatccctttggccttttcggctcccaaacagtaccagattactaggtacagccactttgccttgaagcccttgaaatggttcaacttagccaactcacagggtgtcctgcaacactagctcagcctctcgctctgcttgccctcataagccccggtactgctccagcttgctgttacctgacccttgctgcaatgccctccatggctcttctgacatttttctgtcctttggagctgtaggtagcagaatactgcctttcctctttccaaatgtcactgtcttgtgtcttttcatgaaaagaatctttaaatcttattcaacatatacacatctccatcctccatgttctttaagcatctgtggactttatctctcctgggtgttttacccactccgctccatcacttacttctgcctatggtcccctctccattattcctttattcccatgcccactgcatccctcagttcctcagagttcactgtgtgttattccctaacttccttgcacactttgtcccatagtgtcctgaaaacccgcagtgccctttaaacacattgcatcctttagccgcaagtgcatagggagcggatctccgtgcccttaaaaagccgtgcctgatacgagtgcctctgtttgcttgcaggcttacctactgaacactaacactgtgatttttgattagcgatttggataaaccatatgaattccaaattctggaggaactgtgcaaggctggacagtgaggaggggctggagatgaaaggtcaaccatgcaaagtatttgaccacattccactataactctgggcaccaaggcttgaatgagcttccctggttggtaatattccataagtaccatcatttattgatgctgggaaagtaatgcttccatgactgcagggagaggacaacaggaaactccagatatggtgcttttcctaaattctgccccatctgcttcttcccttgtggatgttaacctgtatttttccctgtaatatactgtaaccatgagcgtaacagctttcagggagttccgtgagttcttccagtgaatcatccaactatagagtgacttggggaaattctgaacttccagttggtgtctgaagtgagtgtggtcttgtgtggactgtgtttcctgtaacttctcagttggcctcaaatatttcctagaagaatggagagtgcacctaggtcaaattgtggatttgtgtgttgagaaatcaaagtttcactttggactcttatattttatttattttctttgttttttctgagacggagtcttactccatcgcccaggctggagtgcagtggcggatctgggctcactgcaacctccgcctcctgggtttaagcgattctcctgcctcagcttcccgagtagctgggacttgacaggcgcccgccaccatgcctggctaatttttgtatttttagtagggatggggtttcaccatgttggctaggctggtcttgaactcctgacctcgtgatccacccacctcagcctcccaaagtgctgggatgacaagcatgagccactgtgcctggccctattttctttttttcttaagactaatcaagtgcagtagtgacaagggggaaagagtagaataaggagttccatctgtaactgactgtgaacaatccattgagataactgactatcttcggacctggctcttacattttcacttcccaattgattacataacggatgagtgcttctttctagaaattgaggaacagtgtatatagagagttctggtaactatctactgctgttctacctattaaataatgcagtaagcagcagatggttacctattatctaattttacctattataaatatctaataggtaaaagaatggcagaatttgcctgtcaaatcatgtgaattggtactttatttttgatgggcattttattcagcatctttctttttaaaatattttcttaatttttaaatttgttatatataaattatataatatataacataaattttatacacacacacacacatacacacacacacacacatatatatatatatatatatataattttctttttaaagacagagtctcactctgtcacccagactggagtgcagtggcacaatctcagctcactgcaactttcgcctccctggtccaagcaattctcatgcctcagcctcccaagtagctgagattacaggtgtgaaccaccatacctggctaatttttgtatttttaggagtgacgggtttcaccatgttggccaggctggtctcgaactcctgacctcaagtgatccacctacctccacctctcaaagtgctgaaattacaggtgtgagccaccacacccagccttattttttatttgtattattatttttgagatgggctccggctctgtcacccaggctagagtgcagtagcacaatctcagctcactgcaacctctgccccccaggctcaagcgattctcatgtctcagcctcctgacctcctgagctgggactacagacacatgccaccatgcccagctaatttttttgtatttttggtagagatggggttttgcaatgttgcccaggctggtctcaaattcctgagctcaagcgatcagcacgccttccagagtgctggggattacaggcatgagccactgcctccggccaagaatattttcatgtttagactttttctatcactgttggggtcaaaacaggaaagtatattttcctacaaaacgtccatatcatcatttctaaattaatttctgtttatacaaataagtccaatgatttctaatgcaaattattgacatcatgtttttcttttgcacttatttcatttcttattattaatccattttagattctttctctgattccatttacttgctgaatacttaaataatggagcagcttaggattctggaaattaacagtgaacttgattttaggaaaaatatctcagagaagtagggaatccagtgagataaaggtgcttctctgccaattcctcaggcatcagacctcaatattttctgctgcttaaagccttcaggaatcttgaaaagtaaaagccccttttgtatactttaatgatctctttgaagacaggagaaagttgtaattgcctttggtaattgcaactggaaaaaaaagtttttcaaaaatgttactgtctcccaaagtctgcactgttattgctgcaccaggtgaaatgataattgcagttctaaggtgaggtgaggtcacaggatcacaaaactttatgtcagggtctggtggcctccctcccatatttgcacaagttgttgtaatcttcacactgaaccaaccactctggcagtgggaagaagttaggtgagtatatttgtttttcagccagagaggtagaatctgcaagaaaagaagtcttagggccaggcatggtggctcacacctgtcatcccagcactttgtgaggccaaggcggggggtcacctaaggtaaagagttcgagaccagcctggccaacatggtgaaaacccgtctctactaaaaatacaaaaaattagccaggcgtggtggtgggcacctgtaatcccagctacttgggagactgaggcaggagaatcgcttgaatccaggaggtggaggttgcagtgagccgagattgtgccattgcactccagcctgggtgacactagcaagactctctcaaaaaaagaagaaaaaaagaagtcttagtaattgattatgtccagaaaaggggttcctctgaggtagaaacagaaccagtgctaaagacagacaaagaggaggaataattccttatgtataagctgagccagtgaagaaagatgacagtcctaaaccctacaccaatccctgatggatacaaaggtatcttaacaaaatcctcacttgggatgatggttggtgaataattccagtgataattaaataagatttatggtgctcaaggattgtagtaaataaatatatgtgttgttcatatacctcccaggaatcatacagtaaattcataatatttttaataatatgcttgtactgcctccatgattataatgaagagtaggatggatctagaaaaattaccttatcctgtgcagaaaccatacatctgaaatcatttctggaataaaataatttgtttttttaagaaaccttgctctgtataaatgatgcgcttaatggagacagtgattgtcctccacagaaaacctctgtgctcttaggattatggtgaggctgctttccctcttgaagttagggaagtagcatttaagggaaacgtagctttactattaagaatttcaaacagcacttgtcagggtcaacggtatcttgtgttatttttctctggtcaaaaacgctctctataactttaaaattttttgattttattgtagtgagattacttacaatgagaactatcctcttaacaaatatcttagtgtacattatagcactgttacctataggtccaatgctgtgcaggggatctctggaagttattcatcttgttttcctgagacttcttgcctctgaattagcaactcttcattaacccctccccgcactccctggcagcctccgtcctactctctcgttctatgaggctatttcagattacacatacaagtgagataatgcagtatttgtccttcactgactgccttacttacctagcacagtatccctacggttcatctatgttgtcatctcctgcagaatttccttcttcctaaaggttgaataatattccattgtgtatttatacaccaagttttcctcacccattcatcattccacggacagttcggtgggggctattgtgagcagtgctgcaatgagcatggaagttctaatatctcttggaggtcctgacttcaattcttttgctaaatactcagaagtgggaaagctggatcatatggtagttcttattttattttgttgtttttttttttagagatggagtcttggtatgtttcccaggctggcctcaaactcctaggctcaagctatcctcttgcctccgtcccctgcataattgggtctgcaagcatgcaccacctcatgtggcctcattttaattttttgattaatgtctatattgttttccctacaggcagcaccatcttacatttccagccacagtatccaagggttccaatttctctgcatctttgccataccggctgtttttgctaatagtgattgtaacaggtgggaagtcatacctcattgtggtttttacttgtgttttctacataatcagtgacattgagcatgtttttatataactgttgggcatttgaatgtctcctttataataatgtctattcagatctttagcccatttttaaattaggtctatttttgttttgttttgttttaggagttattttttgctattgagttgtagaagttcatttccctatgatttcaacatcaataatgctcaagattttatggtctctggattccgtttttacatatttcttctattttattgtattttacaaattatatttccctgctaatagcttcgcatgacttgtacattaatatattgatgagtaaatgatcaaaaattagtaataattgagtttctataccgttttaatacatgttagtatttcatgtataaaagtttagaaacagagtaatattgttcaatgattcatttgatagataccattgtacgttttctcctgttgggtgagtaaatgagtctttctgctaccaaactaatattgagccattcttgcattcagtaaatccaacttgcatgtgaggaagtttcctttaggattttaatcagtgcaccgacagttcattagtatatcaaaagttattgacattggatattgacctatacagtaaatctttacacagaaacaaaaacttgctttgatcaaaattataaaagaaaataccagtgatgagaaatcagtggcatggtaaacagacaaaactaactaggcctagattttttaaaaacacagctgcctgatttgttagcgtagcaagtccttaggttgttgtctttgcaaccaccctagtcaaattcgagtctcttttcaaccctgaagatgcctgtgaattttgacaaatcattgaacctctctgtatctaagttcttcttgtctctacaaggaaaattatgccagtgaatccatcatacagttacaaaaatcaaagaaggtaccatacataccacatgataggcacgattcctatattgtaagtgctatttaaatgttatacattcaaccctagaaagtctctcagcaaaacaaaactttcaacatttttcggtagaatactgtttttcagttatgtcattaatgcaatctacacctcgtgttttctgcaggatcttctggctctcaagacgaatgtcaatcactaggaactggcagagtggcctccagggataggaggaatggtctatttatcacagaatattgttggaatcctgaaaaatttctgtcttccttaccattgtgccttcttttatttagcagggtgcagattgaggtccacagatttgaatcagaaacacctgattatagccacttcttgctcattctgtttaaaggtgtccccaagacacacctctgtatgcagcaccaagtcaatggcagattttaggtgatataacttcctaaatgatttcagattccaatttgtttctgtcctcacagagttggtagggtatgaccgttggcaccacctgtgtctgcagtgtttcaagccatcatgataagccccaggaactacaggtgtgtagaatttaaaatgaattatccaatgtatattgggctttccatttttctctgctggaccctgatacattgataaatacgattttttccagccgggtgcagtgtctcacacctgtaaccccagcactttgggaggccgaggtaggcagatcacttgaggccaggagctggagaccagcctggcccacatggcgaaaccccatctctactaaaaatatgaaaattaaccaggcgtggtggtgcaggcctgtaatcccaactacctgggaggctgagacacaggaattacttgaacccgggaggtgtaggttgtagtgcgccgagatcgtggcactgcactccagcctgggtgacagagtgagactatctcaaaataaaaaaaaaaaaaaggatttttcccatgtttataattgccagatatagcagcaaaaacatcacaaagaaaacaagataggatacttttctgctgtattcatgacaaaatcaaatcagagggtcaatatctacaacattgttattattccctaatatttcctgtgtttcttaatctgtgcctgtggctctataagttttctcctgtacagacacaagtggaagctcattcatgaccttagcaccaatattccctacccccaccaaaattattttaactccttttggtcttatgtatttttatcaaattaaagagccatcacaggttataaatcacagctcattggaattttgcaaacaaacatagctctttatgtaatacatagatacaaaaacagaacactgttctgttcacaagagttcacaagaagctccttctttgcactctaagtcactacctacaacagtataattctgttgtttctatttgcaggagtgtaactcttgagattttggtttacatctcttccagtatttaaaggattaaattattttggcctgtttgctactttatataaatggaatcaacatgaattcttttatatttagcttttatatctattccattagaatttttgtgtgtgaccataccttaattattgcattctattaatggtactcattagcattgcttcctatgattccattgtatgaataatcagatgatcgagtcatactatttttttgtttgttttttacttttgtttgtttgtttttgagatagagtcttgctcttgtcacccatgctgaagggcaatggcgtgatctcggctcactgcaacctccgcctcccgggttcaagtgattctcctgcctcagcctcctgagtagctgggattacaggcacccgccacaacacccagctaatttttttgtgtgtttttggtagagatgggttttcaccatgttggccaggctggtgtcgaactcctgacctcaagtgatccgcccaccttggcctcccaaagtgctgagattacaggcatgagccaccgcgcccggttgagtcatactattgttaaaggccatgtggtaattttgagtttgtggcttttatgagcaatgaatagtcctacctatataaactatgtaacttatcttttgttgatatatatatgaatttgtgatggataaattcatagaagtgaaattattgaagcataaattgacatctggtaggcttatgtagctgctaccaaacagttttccaaaatgtttgtatccatttcagcacccaccagcagcgcatgagttcttggtttattcacaaccttgccacacttaatatttcctgtcattttcttttttcttttttctttttttttttgagacagaatcccattctgtcgcccaggctggggtgcaatggtatgttctcagctcactgcaacctctgcctcctgggttcaagggattctcctgcctcagcctccctagtagctgggattacaggcgcacgccaccacgcctggctaatttttgtattttttgtagagatggggtttcaccatggtggtcttgaactcctgacctcaggtgatccacctgccttggcctcccaaagtatgggattacaggcgtgagccacagtgccctgcctaattttttgaattagctgaaattttcttttggccaatattaaggtcactggtgaatattctatgcatgccttatagggataaatacgaaataaaaatgagagcctgcattcctcctttgaaaatatggcaaggcatttctcttcctcctctttttgtcagaatatttaccttagaaaacttgtgagtactttctcccgaaatgtttatttttagaaactaaataaaccttttgtcagcataatgacctagggatatctttctcaaggacttgggagacatctctttcaaatgtcaacatcactagagatagcacctgtatctctctgtttctgtgggttggtaggagcctatctacagtgggtacctggctccattttgtaaaactaccacctgttgtaaacatataagttagggttttcccccctgcttctgaataaagctaattggctaacatagatggtctccccaattaccatgtaaggtcaggatgaacaatgtataagcaatagcgcaatcaagtttttgaggctaatcagtgcttatctcaaaaaccagtctataatgggttgtatagaaattattctttttcctatctcctaacggattgcctctattgcgtatgatattcctgttaaatgtttattcatcaataaaattgttggccaggtgcagtggctcacacctgtaatcccactttgggaggccgaggtaggaggatcacttgaggtcaggagtttgggaccagcctggtcaacatggtgaaaccctatctctgctaaaaatacaaaaacttagctgagtgtggtggcacgcgcctgtaatcccagctactcagaaggctgaggcaggagaatcacttgaacctgggaggcggaggttgcagtgagccgagattgtgccactgcactccagcctgggtgacagagcgagatcctgtcaaaaaaaaacaaaaaccaaaaatgtccatgctgatcccttgaaaattttagaagcaacaaactccccatatacataatgggtttataactttaagctataatcagcttatcctctactttttagtttcatgaaaagctctgcaatcaactcatttctttgcttcagatcataaaagtcaatgctaaaagttgtttcgtggcaacatagctatttagcaatattgtgtaatatagacatctatcttgtacagatcccaaaatctatcccagatactgcatcttcaaaaaataatgctgacctaggccaccatggagtgtgcctggagtcctagctacttaagtggctgaggcaagaggatgtcttgagcccaggagtacatatgcagcctggaaaacacagttagaccctgtctctaaaaaataataataataatcgaagtaaaatatgctgatatgggccgggtgcggtggctcgcgcctgtaatcccagtgctttgggaggccaaggtgggcggatcacgaagtcgggagttcgagaccagcctggccaacatggtgaaaccccgtctctactaaaaatacaaaaaattagctgggcatggtggcaggcgcctgtaatctcagctactcgggaggctgaggcaggagaattgcttgaacccgggaggcagaggttgcagtgagtggaggccatgccacagcacaccagcctgggcaacagagcgagactccaactgaaaaaaataaaaataaaaaatgctgatatgtcatctcgtatccatctttgtgacatatcactatatcctcattttaacctgctaatattttaaatatgttcattttcatatctaaacatgatcatacttcaagatggatgaagggatccaaaaatagggatataaggccgggtgcggtggctcacgcctgtaatcccagcactctgcaggccaaggtgggcagatgatcacctgaggtcaggagtttgagaccaccctggccaacatggcaaaaccccatctctactaaaaatccaaaaattagccaggcgtggtggcacgcgcctgtaatcccagctactcgagagcctgaggcaggagaattgcttgaacccaggaggtggaggttgcagtgagctgagatcgtgccattgcactccagcttggatgacagagttagactctgtcttaagaaaaaaaaagttgggggggtgagatatcagagaaaagcatacttattagtacctgttaattcaaaaatattgccataaaattattgccggcagacgtaaggctatttaaaatttgataatctagttttacttctatcagggttctataaaagaataatcggcctaccaaatacacttagaattactgcagagttattctttagatcaataaatacaattgtcttctgaagactattttaagggctttgttatctacaggggccagtacattgaagaagagaaaacaaacaagatttaagagattataatttttaaaataaaaagtatgtttacttattactttcagaatgcacctaaagtgaatctgaaattacagtatttttagaaaatattgacctaagcctcagcctcccaagtagctgggattataggcgtgtgccatcacgcccggctaatttttgtatttttagtagagacggggtttctccattttggtcaggctggtgtcgaactcctgacctccagtgatacgaccgcctcggcctcccaaagtgctgggattacaggcgtgagcaaccgtgcccggcctctattgcttttttaaaagcaatagctggtgacctgacttctcaccggccttagcactccacgccccagatgtggcccaggaaactctttggaactctctactccagagtgaatggggaatagaaatggagaggatttctatgctattctgtggggcgtcagcgtgaaattacacattctgcacaggttgagtttgcatattgtattttagtttgcattcctttcacagacaatttaagggattttcaattaaatttctaaattttaattgaattccttaattttaattgtgggaactttcctggatccaaacaacagacgttgaccctcctagtgagatcccaggtcacaaaccgtggagcggctccagcctgactggcaagtgtggcttgcaaaacgcggaaaaccgagacacgcccagagataggaggagggaagtgcaggccccgtccaataagtattcaggccccgcccgccacgtcgctggccacgccccggcccggcctctccgttcgcgcgcagccgcctgcagacccggaagtggatggcgtggagatatggcgcaactgcggcgcgtgagttttcctttgtttagattaagtgttcgcttagcggtgccctcacgcttctgtacccgggatgtggggggcggtacagaccttgaaatccccgcaccgctctctccaccccgagtaaattcatgcgtcccgtcagagtgttaaaatcgccctagggctggttctgtctccggtcgttctgccgtagggctgcgtaggcagctgctttcgcgccgttttcctgcttaaaacccttcagtgacccctccgccagccccgcgccacgtaaagtccccgcctgcgaggcggatccacgccctccgggtcccaagcctcgtccttgtcggcccctggggcgcagcgccgcagccgccattcgggaggggccgcgtcctctgcctggtctggggattctgcagaccccacccctgatctgcctgccgccgtagtcctccttgggccgttcccttctgtccccaggccttttcgcagtcacggcttctccggatcctgtgttgggggaggtggccgggacctatctcagggcacccagtgttcttccgtcccaaattcctcccattggaaactgtgctcttgaggaggtgggtattttattccagtcccctccctgtgaatgtgaagtgaaagagagatggagagcgaggtagaggaaacagaaaaatttagagagaaaataatgaggaagatccataacaagacggcaacgcagagggagggtgagagatttgcaaagtgaaagaagcaccccaggaagtagcagggagagaaaagcaactcgagaaatgtagagaaaagttctatttctagacagatgaaggacagcaaggtagggagaggggcagcaaagcgggaggctcctcagacaaagttggggagaggaggagggatttggagccagggcagaccgagcagcgtggtgctggcacagcaagagggggcagccggtgacaaggagggcaaagggagaaccaccccagagatctggggttgccagacagtagggacaagggggcgtgacagagaagagggaatttaacaggaggagcacagatgggagaagaaagaggcagaaatatatggagattggagacaatcaaaagattggagagaaagagcaacaagaggaaaaaaattgcaagatggagcagatgaagtggaaaagaaggaatagagggaagaaggggagaaactgcgggagaggagaggggctcaaaatctcggctcactgcaaccttagcctcctgagttcaagcgattctcctgcctcagccacccgagtagctgggactacaggcgcccgccagctcgcctggccaattttgtatttttagtagagacagggtttcaccgtgttggcctgacgggtcgtgaactcctgagacctcaggtgatctgcccacctcggcctcccatagtgctgggataacaggcttgagccaccttgcccggcctcctcacattttattaatttgctggaatggttcccagaactcagagaaaattttacttaggtttactatcagttataaaggttattacaaaggatacaggtggaagagccatcctagcaaatcaaaatagaggagtgtgttttggaaaccgttaattttatccatatctgaggtgaggggcagtcttgtgggactgagtccttaactgggatctgattctatctccaggtagatactatcaaaattgagttaaattgtgggtcatccagctgggagtgtgccagagaactggtcagtatgcggaaaaacacgtgcacatttccatctcaaccagtaaagggaagagatctccaaccggcccacccacctgtctcagggcctgtgatctctactcagtagtaactgggaatggtctgtccctccccctggctgttgctgaccctgcgattgtgcaccaggtgccagccctactcacagtctcaggacagtgtgacatccttcctctggcatcaccaatatttacttcaagggattactttggttagtgcacccacatggaggtattgtccatgaaaacacacacagacacactggctgggtgcgatggctcacgcctgtaatcccagcactttgggaggccaaggcgggtggatcacttatggccaggagttccagaccagcctggccagcacggtgaaaccccatgtctactaaaaatacaaaaattagctgggtgtggtgacacgtacctgtattcccagttactccggaggctgaggcaggagagtcacttgaacccaggaggtggaggttgcagtgagccgagatggaggttgtagtgagctgagatcatgccaccgcactccagcctgggtgacaagagtgagactgtctcaaaaaaaaaaaaaaaaaaaaagcacagatgaagccttcattttcttgccactcctccatgattaaaataaaaaatattctattaattacatctctccctgtagtgagtacccctcttcaacgctccatttgagaacacagtacactaaaatcttgtttatatttctgtcttcagtcttgcctccagttcttgatttacccccttccaattaagctttcacctccaccattcctttgatccttttttcccagaggtaccagtgatctctgtgtttcgaagtccaattttgaatttcctatcctcatcttttcgtcttagcaacatgttgcacagctgatcattccctgttcttttttcttagctttgaagacatctctaagtttaattactttgtttcagatttttgtgttaccagtttcctctgctggtgtctcctgaagctgtcttctctgaatgtgggagtgtcccatgatttaggtctttttcatttttgtttttgtttttaagacacggtctcagtctgtcacccagactggagtgcagtggtgcaatcatagctccctgcagccttgaactcccgggctcaggaggtcctcctgcctcagcctcccaagtagctgggactctaggtgcataccaccacacctgagtaatttttttattttttagtacagactgggtttccctatgttgaataggcttggatctcaaaactcttctcatctcttttcacacacactacccttccttatcatctcatctcatggctttgaaccccatctacctgtctccatgtgccctgcagacctctgccctgaggtctagaaacctgtgttcagttgtcccctcacttctctgctgggacatctaacaggcatctccaccttcgtatgtgccactttctgaactcccccaaatgcattcccctgcagtcctgcacatctcagatgagggtgaccctgtacttcctggggcttagctgaacttgtcatatgttcaaaatatgtaagatgttacattgtaaatacattaatatatttttttttcgagacggagtcttgctgtgtcaccaggctggagtgcagtggtgtgatcttggctcaccataacctctgcctcccgggttcaagcaattctcctgtctcagcctcccaagtagctgggactacaggcgtgcaccatcacgcccaactaattgtttgcatttttagtagagatggggtttcatcatgctggccaggatggtctcgatctcttgaccttgtgatctgcccgccttggcctcccaaagtgctgggattacaggcatgagccaccatgcccagcctataagtacattaatttataacataaataattacatagttactaaaacagatgaggaaatttgttgtttctgaaattctttggaggtatgggagagaaatgttggtggcctcatccctgtgtgatctgcatcccaggacctctctgagctcatctcctccctgtgtccccctcgttccctctgccgcagccacacagacctctttcctggggccagggttgctcctgcctcagggcttccacctgggctgtccctctgcctggacatctctagcctgtcagctgcaggtgcaaacaccttttcttccccaggtctttgttctgatattaccttcttcatggagggttctgtgttcctctccaccctacatttaacactccagctacacccttacccctactgtggtccacattgcctgctctggatgtttctttctgctcttttgctgtccactacgtaaatcctggtaacaagacccaagggtagagcagagccagaaggtgggggtgtgctgggcttgccccgtctgagtggagctcacccctgttttcacattggagtgcagatacacatcttgtgcccccagcctcttacctgagattcccattcacatactcaggttgggcccagccttaatatttgaagttgattctacagtagtttctccttatctgccagtgtactttttgaggttccagttactcatggtcaaccacagtccaaggtattacgtggaaagttccagaaatgaagaattcacaagttttcaatttctcatccttctgagcaggatgatacaatctctcactgtcccactctgttttgtccaggacttgaatcatctctttgtcctgtatgtccccctgtatagtcatccctcggtatcacgtaggatttgcttccaagatccccccaagactacccaaatcagatgatcttcaagacccttatataaaattgcataatacagtcacatgccacataaggacatttcggtcaacagcagcccacacctgtgatggtggttccataagattacactggagctgaaaaattcccgttgcctagctacctcagagcagtcatgacatcatagtgcagtgcattccttgtatttgtggtgatgctggcggaaacaaacctagtgcgttaccaaacagctttaacctggatgtggaggaggatgacattgagaatctcttagaggtggttcatgaggaatgggttaatgaggagtcattggaactgatacaggaacatgtagctgaagaagaggcaagagaatagggaactggctgggcacggtggctcacatctataatccctgcactttgggaggccgaggcaggtggatcacttgaggtcagtagtgtcaggagtggtggcacatgcctgtggtcccagctacttgggaagctaaggtaggagaatcacttgaacccaggaggtggaggttgcagtgagccaagatcacgccactgcactccagcctgagcgacagagtgagactccatctcaaaaaaaaagaatgagccaataggaaactgaaggagaaaaagaaagtactctcaaggcaattcacagttaaagatatagcagaagcttttgcagaccttgacaagctccttaaaaggtttgaaaacataggcaccaacacctaaagattttcattaatagaaaggagcgtccatgatgcattatccgctcataagaacatttaggaagacaaaagaaacaaagcaagcaaaccaccatggacgtatttctgaaaggagtgacgcctctagaagaggctcaggcaggtccttcaggaggcgtctgggagaaaccattgttaccataggaggactttctggtgggagaagatgtggcactggaagacagtgacactgatggtcctgaccctgtgcaggcctaggctgatgtgtgtgtttgtgtcttagttgttgacaaaaatgtttaaaaaggttaaaaaaaaattaaaaacaagaaaaagtttagagaattaaggtacaaagataaaatatttttgtatagctgtacaacatgtttgtgttttaagctgttattgcaaaagaatcaaaaagttaaatttaaaagtttatacagtaaaacagttggaataagtaagcttagtttattacggaagaaaaaagtattttttgtgaagttagtgcagcctaaatgtgcagtgtttataaagcctgtagtagtgtacagtcatgtcctagaccttcacattcattcatcactcactcactcacccacagcaatttccagtcctccaagctccattcatggtaagtgccctagacaagtgtaccattttttaaactcttataccatatgactactatattttttctttctttttttttttttttttgagacagaatctcactctgtcacccaggccggagtgcagtgcagtggtgtaatcctggctcactgcaacctccgcctcctgggttcaagtgattctcctgcctcagcctcccgagtagctgggattacaggcacccactttcatgcctagctaatttttgtgtttttagtagagacggggtttccccatgttagccaggctggtctcgaactcctgacctcagatgatccacctgccttggtctcccaaagtgttgggattagaggcatgagccgccgtgcctggccttactgtaccttttctatatttagatatgttttgacttacgagtacttaccgttgttacagttgactatagtattcaggacatagcatgccctacaggtttttagcagtaggctgtattatatataccagatgtgtagtaggctatgctatcttggtttgtgtaagttccctctgtaatgaaatggtctgaaaatgcgtttctcagaacatgtccctgttattaagcgatgcgtgactgcatttgcatgtaacctatgcacatcctctgcaccctcccatatactgtaaacatctgattactggtaatacctaattaaatataaatgctatgtaaatgcttgttatactgggttgttttcttgtattatttttattgtattgctattttatattggtatattgcttccttttgtcttttttaaattatttaagtctgtaattggttgaatccatggatacagaccccatgcactgtatactctgtctgcccatcaatctgttaatagtcttcttttttgttttgttttgttttgtttttaatagtagtctttttgatcagatccaattttgtggtacctcattggttttgtttaagtgatccttattttacttaacatgccccccaagcacatgagcattgatgttggcaatttggatatgtcagtgagaatctgtcacaggcatcctttaagtggagtaaatagggttcagtactgttccaagtttcattcactcagggttttgcaacgtatccccttggataaagggattttactgtattctgtatccagcattgagcaccgaagccgtgttctcatttctgaaggctgagttcagcctctgattcacaaagaggtgagggggtgctgtgctctgcatggggtttggtcagagccaggtctgtgccctgaaggggagcttagtccagcccagctccccactgctgcagtgtgtgtgtgggcttctccaggaggggagcgggttctgaagaaaggggccaaaagctcacttgttcttcctgtaggagtttattgtcccggcatcaactctgatgcagtgggcagcagaggaccgtatttccacagggtgaggtcttccctgcgtgtgtggttgtggcacaggaagaaagtatgttgattctaaaccctaaacagcatatttttgacattcaggattgacttctaaagagtcatgttggccgggcgcgggggctcatacctgtaatcccggcactttgggaggccgagacgggcagatcacgaggtcaggagatcaagaccatcctggctaacacggtgaaaccccgtctctactacgaatacaaaaaattacctgggcgtgttggcgggcacctgtagtcccagctactcaggaggctgaggcaggagaatggtgtgaacccgggaggcggagcttgcagtgagctgagatcgggccacggcactccagcctgggtgacagagtgagactccgtctcaaaaaaaaacaaaaaaagtcatgttatgtgaaggagaagcccagaagaggaaagcagaggagtcaggcatgccacttactcaggtaaagtgatattctcagtagattgttctgtttcttatttcttcctgaaatgccgggtgctggagttgagaatcttctctgagtctgaagcatcctgcctgacaggtttgctcacactcacccatgccttccttcagtccctctcatctcgcttagattccatctcttgtgacccagtgacatgaacttgggaagaggctgcactgggcgtgatcctgggaagggctcacacccagacgtgggtggagacggggtgagggccccgtggtgtcagtgctgttgggcagcagggattgttcaggggccacatctggatgctctgtcagctctctgtggaccaggattagagaagctgcccacagaaatcacctattaatgtgcacaagtacctggtaaattctgcaataaaaattcaggaaatcttttctgccttttttttttttttttggagacaagagtcttgctctgtcgtccaggctggcatacagtggtgcaatcttggctcactgcaacctctacctcccaggctcaagcagtcctcccacctcagcctcttgagtagctgggaccacaaatgtgtaccaccacgcccggcaattttttgaatttttggtagagatggggtttcaccatctccacccacctcagcctcccaaagtgttgggattacaggcgtgagccatcacgccaggccttttctgacttttagtaatagccattctgactaatgagatggtatctcattgtggttttgatttgcatttctctaatgatcagtgatactgagctttttttccatatgcttgttggctacatgtatgtctacttttgagaggtgtctgttcatgtcccttgcccacttttttcgtttgtttgtttgagatggaatttcgctgttgtcgcccaggctggagtgcaatggtgtgatctcagttcactgcaacctctgcctcccgggttcaagcaattctcctgcctcagcctcccgagtagctgggactacaggcccctgccagcacactcagctaattgttgtattttcagtagagacggagcttcaccatggtggccaggctggtctcggaacttctgatgtcaggtgatccaactgcctcagcctcccaaagtgctgggattataggcatgagccaccgcacctggccctttgcccactttttaatggggttttctcttgtaaatttgcttaagttccttgtagatgctggatattagacctttgttagatgcatagttcgcaaaaattttctcccattctgtaggttgtctgctcactccgttgatagtttcttttgctgtgcagaagctcttaaagttaattggatatcacttgtcaattgttgtttttgttatgattgcttttggtgtctttgtcatgaaatctttgcccattcctgtgtccaggatggtattgcctaagttgtcttccaaggtttttatagtttggggttttacactgaagtctttaatccatcttgagttgatttttgtatatggtataaggaaggggtccagcttcaatcttctgcatgtggctagctggttatccagcaccgtttatgaaatagggagtcttttccccattgcttgtttttgtcagctttgtcaaagatcagttggttgtagatgcacggccttatttctgggctgactattctgttccattggtctttgtgcctgtttttgtaccagtaccatgttgttttggttactgtagccttgtggtatagtttgaagttggataacttgatgcctccagctttgttctttttgctcaggattgccttggctatttaggctcttttttgattgcatatgaattttaaaatagttttttctagttctgcaaagaacgtcattaggattagctttcaatctgtaaattctttgggcagtatggtcattttaattatatcgattcttcttatccgtgagcatgggatgtttttctgtttgtgtcttctctgatttctttgagcagtggtttgtaattctcactagagaataaattttaatggacaaagcaatgggttagtgcagtagtataagcctataatttgagcttcttgggaggctgagatggtaggatctcttgagtttgagaccaccctgggcaacatagtaagacctcacataaattttaaaacatattatatttatatatttgaaaataggtatttgtgactggagttcaagtttctatgttttttttttcatgatttaccttttcttttttttttttttttttttttttgagacggagtctcactcttttgcctaggctggagtgcagtggtgtgatctcggctcagtgcaacctgcatctcctgggttcaaacagttctcctacctcagcctcccgagtagcttggattacaggtgcccgccaccacgcctagctaatttttgcatttttagcagagacggggtttcaccatgttggccaggctggtctcgaactcctcacctcaggtgatccgcccgcctcagcctcccaaagtgttgggattacaggcgtgagccaccgctcccagctggtctactttttttaaatagcttaatatacaataatgtttataaactaaactgagtactatttatacatttttattgttgcaaagatgctgaaatacacattagcaaaaataataatgactgccaggcagtatgtgcaccgttagccccagtttcttgggaggctgaggagggaggatcatttgagatcaggagttcaaggctgtactgtgctatgattactcactgtaccccaacctggacaacatagcaagacccagtctctaagaattttttttaaaaaagatgacaaatatcatctaaaaaataggtcattgagagacaactccttatttcatctgatgtgtaaattgtatatgtgtattactttataaactaagtgtgtgtaagtgtatacatgtgatgtgtttgcatgagtgcatggataagcaagcctatagttaagctacaacatcattttataagaattttttaattttaattttaattttatttttcatttttttgaaactgagtcttgctctgtcgcccaggctggagtgcagtggcgtgatctcagctcactgcagcctccgcctcctgggttcaagcggttcttctgcctcagcctcccgagtagctgggactacaggcatgcaccgccacacccagctaattattatatttttagtagagacaggtttcaccatgttggccaggatggtcttggtctcctgaccccatgatccacctgcctcggcctcccaaagtgctgggattacaggtgtgagccaacacttttggccgtgcgtgatggctcacgcctgtaatcccaacactttgggaggcctaggcgggtggatcacctgaggtcaggagttcgagaccagcctgaccaatggagaaaggccatttgtactaaaaatacaaaattagctgggtgtggtggcacatacctgtaatctcagctactcgggaggctgaggcaggagaatcccttgaacctgggaggcagaggttgtggtgaaccgagatcgcaccattgcacttgagcctgggcaacaagagcaaaactccatctaaaaaaaaaaaaattatattttgaacagttgaaattacatctgaaatacttgccatgaccttataagtgttctacactattgggccgggtgcggtggctcatgcctgtaatcccagcattttgggaggccgaggtaggtggctcgcatgaggtcaggagttcaagaccagcctgagcaacatggtgaaaccttgtctctactgaaaatacaaaaattagccaggtatggtggtgcgtgcctgtaatgctagctgctcgggaggctgaggcaggagaattacttgaacctaggaggcggaggttgcagtgagccgagattgcgccactgcactccagcctgggtgacagactgagactctgtcaataaaaaaaaatgtgttctacactatcacgttaatgagttaatggcagtaagaatagtaatgtattatgaggaggatacatgtgtatgcatatagaatgaccttttacgcagattcagatttttgtccatgaacttaactttactcagttaggtaattgtcagtttacttttaatgctgatctgttacttaactgcttgattctttaggtttgattctaatgcccagacacaaaattaacccacaattctatagaagtgttaggtattatgttcgacacaccaagtgatattcattgtctacctgagctagaatacaagtagttggcgtcttcagagacacttgtatgctagctcaggtagatattgaatgaaaaatctacactagtttaaagaatatcataactttttatggaaaagtataataaaactcaatcacagacacataactagctcaaaaataccttaatgtggatatgtcagaatgttcacgtcagcacttcagttgagtcagtccttacaaccctcttctcatttcgtgtgaacataattactctctccttaccctgttggtcaaatacatcttttattttagggacacttgacattcagggacgtggccatagaattctctcaggaggagtggaaatgcctggaccctgtgcagaaggctttatacagggatgtgatgttggagaactacaggaacctggtctccctgggtaaggataatgcccctccagaagttggggtctgcccttagtatctctgcattttcccttgtgtgcctcttgggagcccctgcattgcttgactgagattgaaaccctgttgacttggctgggcacggtggctcatgcctgtaatcccagcactttgggaggctgaggtgggtggattgcttgaggtcaggagttcgagaccaacctgaccaaaatgataaaaccccatctgtactaaaaatacaaaaattagccaggtgtcacggtgcatgcctgtaatctcagctacacgggaggctgaggcaagaagaattgcttgcacccaggaggcagaggttgcagtgagctgagatcatgccactgcactccaacctgggtaacagagcaagactctgtttcaaaaaaaaagaaaccctgttgactcagaaatgaaaagctcccgtatgctttctggtcttgaaattccccctttcttcagacattctgtatccttcatgatacacctttgggtggtacctgggcttaagtgtgcataaaaccttatgacaaacttttaaaatatccagttccctgttttctacccctgtgcttttgattctatagttcttggaagagagttcgatgtccaattattacacagttccctacgcattcagaagcagacagtctgtgggtgaatttgtgaaatgtttttcttgaattcttgattagtttttttatttatttatagtagaatgacttataatcctttgagtatatacccagtaatgcgattgctgggtcaaatggtatttctggttctagatccttgaggaatcgccgcactgtcttccacatggttgaactaatttacactcccaccaacagtgtaaaagtgttcctgtttctccacagtgtctccagcatctgttgcttgctgactttttcatgatcgccattctaactggctttaaaggattaatttttaatatcatctctgctgcctaaacagagggcttggattttggagacatcacagcacatcttgattctttcttttataaacaggaatctgtcttcctgacctgagtattatctccatgatgaagcaaaggacagagccctggactgtggagaatgaaatgaaagtagcaaaaaatccagataggtgggaaggtatcaaagatatcaacacaggtaagagctcagatggacagagtgaaagccacacttttttttttttttttgagacagtctctgttccccacactggagtgcattggccatcatagctcactgcagctttgaactcctgggcttcaacagtcctcctgctttggcctcccaaagtgatgtgattataggcatgtgccccttgcctaccagagccacactattaaatcgtgtttataagtgggagaattgtgtggagaaataagagtttaaaacctgtgagttcttaagagaaatctttctttacccccacctgtcaccatgtcctttatgtatgtatgtatgtatttattcatttatttattttgagatggagtcttgctctgtctccaggctggagtgcaatggcgtgatctcagctcactgcaacctccgcctcccgggtacaagtgagtcccctgcctcaacctcccaagtagctgggattacaggcgtgcgccaccacgcccagctaatttttgtatttttagtacagacgaggtttcaccttgttagccaggatggtctcaatctcttgacctcgtgatccgcccgccttggcctccgaaagtgctgggattatggtgtcagccaccgcgcccagcccacgctgtcgtttagatgtgtaatagttttatgtttttgccctgcagtgttactgcagcccaaacagaggcaaaagcaaaggcttttatcatgatggacaataccctgtcatgtggcttctgtcaactctttagtccttgattctgagggtcacagagagcgctgcttcaaaggagtcccttttccctgtggtctcttcctgtatgggattttatctgatgctcagttctctgtccttatacatcagagctgaggtctgcatagacctgcctccttgacctattcatgatctgcccatttcctgtactgggaagacctgatggggagatgggaaaacacaggctgctgtcttttgcatctgggtcctggaaactgcatggagctgtttcaagccctctttgcctgttcagttctgtttgaggtgggaaaaagtcagtgattttcctactctcacatgctacttggcacagaatgcttcatttctggtcaccaaaatgtgtggagatttctccccaccagcaaccagttttggggtttcctgcaattcattggtgacactatctacctgagttagagtcgcgtcccacaggctaagggttgagttcccaagcctgtccgccaccaattgccagtagcgggttgtcacctttccatctgaccaaccagccacaagtcagggttccctcgacccccttcttctgtttggttactttgctagggtggcttacagaactcagtgaaacacttcgttatgtttattggttcatgaggaaggatgtttccaaggatacagatggacagccagatgaggagattcacaaggcgaggcacatgggaagattcactgggtgtgccgcccttgaggcccaccgcacgtgttcagcatgtggaagctctcaggaacttttatggaggcttcattacttaggcatgattggtattaactcagtctccagcccctgtacccttcctggaggatggtggttggtgctgacaattctgtgcttctaaccatggcctggtctttctgggctttctatacctgcagatatagaaaccatggatatgaaggccaatagtaagggacttgagcatcacacattttggtatctcagggttttttagcacaaaactcgcaaaccatgtttttcctctgctctcacaccaccacgacaattatcaacacagaagaagacttctctgaccaaaggtgtggggggttttccccatacaccaagcagcagacagcagctgggtgtcctccaactcacttccaacactgtatctggagatagggccaggtcccacaggtttagggctcagtctccaagacttgccccccttcccaccagttgcaagtctgggtctccaaacttctgaccaactggcttccagttgaggtttccacaatcccatctttgggcccaattagtttgctagagcagctcacagaagtcacagaaacactcaggtttaccggtttattatgaaggatattgcaagggtacagatgaagagacatgtgggacaggtatgggggaaggactgtggagcttccaagccctccctgggcgtgccactctccaggaagccgccatgtgttcagacatcctgaagctcttggaacccagtcctcttgggttttcatggaagctttgtgacatcagcattccttcccccagggtatacagcaggaacctctctggggaggtcttaagacccgcaatcagaaaggtagggggaaagttagagtcctgccttagggcaggtgaaagaagaggaggagaaggttggagaggttatttttcttaaggtctgcagagaaggtctaacccaacattatacccaaagactgtagcaagggctatgggagttatgagccaggaactgtggacaaaaaccaaggtatatgtgtatcataacaccacacagaggagcctggaacgtgtcctccctggataccaagggagggattctgaatcgaaataatggatgtgcacccagtcagtaatcaatgaaagagagttaataagcacaagtgggtaccactgcatttaaatgatataagaccagagagtcaagaaagacctggatcccggaagagctcaattaaaaaaaaaaaaagaaagaaagaaagaatccaagtgggcttttcccccctaattataaaggaaaagccttcattctttcaatattgagtatgatgttacctttcggctttttatatatggactctattatgttaagtaagttcctcgtattcctagtgtgttgagtgtttttctttcttttttttttttttcttttgggggagtgtctcatgctgtcctgatcttgaccttggctcactgcagcctccacctcccaggctcaaacaatcctctcacctcaaccacatgcctggctgatttttgtattttttgtagaggtggagtttcgctgtgttagccaggctggtctggaattcctgagctcaagcgatcctcccgccttggccttccaaagtgctaggattacaggcatgagccaccgtgcctggcgagtgtttttatcataattgctaaggtttttcaaatgtttttctgcatcagctgagattattgcatggatttctttttctttattctgttattgtgggatattacatagactaatgttccaaagttgcatccttcttgcattcctgaaataaatcttacttggtcatgaggtgtgatccattttaatatgctgctgaatttatttagctaccattttgttgaggatttttgcattagattaatcaggaatattgctctgcagttttgttttgttttgttttaagatggagtctcactgtggcccaaggtggagtgcagtggcttgatctcggcccactgcagcctctgcctactgggctcaagtgcttctcctccctcagcctcccaagtagctgagactacaggcacctgccaccatgcccggataacttttatattttaatagagacagtgtttcactatgttggccaagctggtctcgaactcctgacctcaggtgatctgcctgcctcagcctcccaaagtgctgggattacaggtgtgagccaccgtgcccgacctgctctgcagttttctttttttttttgagacggagtctcgcccggtcgcccaggctggaatgcagtggtgtgacctcggctcactgcaacctccgcctcccgggttcaagcggttctcctgccccagcctcccaagtagctgagattacaggcgcgtgccactacgcctagctaatttttgtatttttagtagagacggggtttcactgtgttggtcaggctggtcttgaactcttgacctcgtgatctgcccgccttggcctcccaaagtgctgggattacaggcgtgagccactacgcccagcctgctctgctgttttctttagggcctttgcctctgctttcaaggtaacactggcctcattgaatgtgtgtagaagtggttcacctcctcaaccttacggcagattttgaggattggtgttaaatcttttttcaatatttgatagaattttacactgaggtcatctggtccattgctgttttagttggtaggtatttaataactgattcagtcttcttatttgttactggtgtgtttagattttctacttcattgttaagtcttggtaagtggtgtctatctacaaatttatccatttttttcttggttaacatattttttgttatataattgttgagtctcatttaatttccatttttatttgtgtagacttgtttgtaatgtcctcttttacctttctaattgtagttatttcggtcgtatgcttcatgtttcttttttctagtttaggtaaggctttgtcaaaagtcttacccaaagagtgaactcttactttcctgactttctctagtgcttctctgctgttttctttgttttctaacctttattttttctttctgctatcttagtgttcatttttttctttttctttttttttttgagatggagtcctgttctgtcgcccaggctggagtacagtggtgtgatctcggctcactgcaacttccgcctcccaggttcaagcaattctcctgcctcagcctcccaagtagctgggactgtgagcacatgccaccatgtccagctaattttttgaattttagtagagacggggcttcaccttgttgcccaggctggtcgcgaactcctgagctcaggcaatccacccgccttggcctcccaaagtgctgggattacaggtgtaagccaccgtgcctggtcgtgttcatttttttctttattgagatataaagttaggttgtttatacgttatttcattgtagtttagttatttagtttttaagagatagggtctcactgtgtcacttaggctggagtgcagcagcatgatcatagatcctggaatccagtgatgatctcactttagcctcctgcgtagttgggactacaagcacacgacactgtgcctcactaattaaaactaatttattttattttatttatttattttgtttagagataaggggtctcactttgttgcctaggctggtctgcaactcctggcttcaagagatcctcccacctcagcctcccaaagtgctgcgattataggtgtgagccaccacacccagccgttttttttttttcatgtatgcatacatcattacaatatcccttccagcactatttttattgcatttcatgagttttgctgtgttatatttacattttcctttatatcaagatatttcctaattttccttttattttatttttatttatttacttttatttatttattttgagatagagccttgctctgtcacccaggctggagtgcagtggcacgatctcggctcactgcaacctctgcctcccgggttcaagtgattcttcttctgcctcagcctcctgagtagctgggattacaggcgcacgccaccacacctggctaattttttttatttttttatttttagtagagatagggtttcaccatgttgatcaggctggtcttgagctcctcacctcatgatccacccaccttgacctcccaaagtgctgggattacaggcgtgagccaccgcatgtggtttttttttttttttgaaacggattctcattctgtcactcaggctagagtttaatggcacagtctcagctcactgcaacctctgcctgccgggttcaagcagttctccggcctcagcctcctgagtagctgggattacaggcacacaccaccatacccggctaatttttgtatttttgggtggagacggggtttcaccattttggccaggctggtctcgaactcctgacctcaagtgatccgcccacctcgccctcccaaagtgctgggattacagccaccacacctggcctatgcagctgctcataagtgtcttattttccctaagagactcatcctgctttttcttagaagctttcaatttctgttgtatttctctactcataatccctctcaaactcacctgtaatcctcctgagtcctgtagattccccattgctccattgcatcaccctaccttttgggttttctccactgccagtgtgatactatgctgatatttcttccagtgtctgaatcagatgaggcagattccagttcctccatcagggtctatacatgccagagtccgggcgcggtggctcacacctataatcccagcactttgggaggccacggcgggcggatcacgaggtcaggagatcgagaccatcctggctaacacagtgaaaccccgtctctactaaaaatacaaaaaaattagctgggcgtggtggcggacgcctgtagtcccagctacttgggaggctgaggcaggagaatggcgggaacctgggaggcggagcttgcagtgatccgagatcgtgccactgcactccagcctgggtggcaaagccagactccaactcaaaaaaagtgcaaaaaacatgccagaaccatgggttcaaattatactctttacttgctttcctagggaggagctgtgcagtgagaagcaaagcaggaaacaagcctattacaaatcaacttggattaacctttcagttacctctgccagaactggagatatttcaaggtgaagggaagatttatgaatgtaatcaagttcaaaagttcatcagccacagttcttcagtttcgccacttcaaagaatttactctggggtcaaaacccacatatttaataaacataggaatgattttgttgattttccattgctgtcacaagaacagaaagcacacattaggagaaaaccttacgaatgtaatgagcagggcaaagtcttcagagtgtcttcaagccttcctaatcatcaagtaatccacactgcagataaacctaacagatgtcatgaatgtggtaaaaccgtcagggacaagtcaggcctcgcagaacattggagaattcgtacaggagagaaaccttacaaatgtaaagagtgtggcaagctcttcaatcgaattgcataccttgcacgacacgagaaagtgcatactggagagagtccttacaaatgtaatgagtgtggcaaggtcttcagtcgaattacataccttgtacgacatcagaaaattcatactagagagaaacctcataaatgtaacaaatgtggcaaggtttatagtagcagttcatacctagcacaacattggagaattcatacaggagagaaactttacaaatgtaataaatgtggcaaagaatttagtgggcattcaagcctcaccacccatctgttaatccacactggagagaaaccttacaaatgtaaagaatgtgacaaagcttttaggcacaagttctccctgacagttcatcagagaaatcataatggagagaaaccttataaatgtcatgaatgtggcaaagtcttcactcaagtttcacatcttgcacgacatcagaaaattcacactggagagaaaccttacaaatgtaatgagtgtggcaaagtcttcactcagaattcacaccttgcaaatcatcagagaatccacactggagagaaaccttacaaatgccatgtgtgtggtaaggtctttaggcacagttcatggtttgtacagcatcagagaagtgttcatgagagagtccttacaaactgagtttggcaaactctatcataagttctagcagtaatcaacatccgagagtctatactagaaagaaatcatttaaatgtactatatgtggcacaggctgtatcgagacctaccaaatcactagacatcgaaacattcatctttggtgaaaccacacaaatggattgtgtgtgccaaggccaacaagtcaaaatatgttgaacctaatgatatgatgtgtataaagggtgcaaggacacgtggaaatgatctgtaatattcgggttattaaaaatgtaattggctgggcgcagtggctcacacctgtaatcctagcactttgggaggttgaggcaggtggatcacaaggtcaggagtttgagaccagcctggccaatatggtgaaacaccatatctactataaatacaaaaaaattagccaggcgtggtggcacatgcctgcaatcccagctactcgggaggctgaggcaggagaattgcttgaatccaggaggcagaggttgttgcagtgagctgagatcgcgccactgcactccaacctgggtgacagagcgagactccgtctcaaaaaaaaaaaaaaattatttgggtttgaaaggccaggggcagtggttcatgcctataatctcagcacaatagaaagccaagacaggagggtcacttgatgcctggagatcaagataagtatgggcaacgtagcaaggcccatccctacaaaataaaaaaaataagccaggcccttggcatgtgtctgtagttccagctactcaagaggccgaggcaagaggattgctcaagcccaggagtttgagagtttgagcagtgagctctgatcttgccatttgtactccagcttgggtgacagagcgagaccctgtctcaaaagaaaaaaaaggctagtttttatgacttcaacctgaactttgaaatttcttcatgtgccttccctacaggcctttcactgtggtctgggaaagaatcagtaagatgacagggctgacttcattagatgaggagcgtttctatccagtttcctggaggaataaggacactgccttttcagattaaagattgtctgatttagagaccatggaggtggacagagaataacaaaaccgtgatggcagtcatcatgcttattgcagttagcacacacttttcctgacaggcacagtgctgctgtgctctacaaatgaccatgaaatagagcacgccatgactttaggacacagggatttttatgggaagagagttcatcagggactgattacgtaggagagacgatgcaggggaaatggtggccaccgtctccattgaatagcaatagctgctgtttagcaaagactgattaaaaagtactctgatttttcaaatggaagagagaacagttaaatcagagtagagagtttaatcaaaactaccagtggaacatgttcttgagtaggattcacatttaactgctggcataatttgcaactgttggattttctcatgtttggaacaataaagttgaaattttccaaagtgtgaatgatttaccttctttctaccaatattgttttatctcgtctcaggaggatactttatagcagacaataataaggcaccattaggatttttaaattaatttatttttaaaattaaagttctagtgtacatgtccacaacatgcaggtttgttacataggtatacatgtgccatattcgtttgctgcacccatcaacttgtcatttacgttagatatttctcctaatgttatccctctgccagccccccaccccccgacaggccccggtgtgtgatgttacccgccttgtgtccaggtgttctcattgatcaattcccacctatgagtgagaacatggggtgtttggtcttctgtcactgtgatagtttgctgagaatgatggtttccagcttcatcaatgtccctgcaaaggacatgaactcatcctttttatggctgcatagtattccttttttttttttttttttgagatgaagttttgctctgtcactcaggctgaagtgcaatggcacgatcttggctcactgcatcctctgcctcccgggttcaagtgattctcctgtctacacctcccaagtagctggattacaggcatgcaccaccatacccggctaatttttttgtatttttagtagagatggggtttcaccatgttggccaggccggtctcgaagtcctgacctcgggtgatccagccacctcgggttcccgaagtgctaagattacaggcatgagccacggcgcctggccaggatttttaaggttgaagcatccacaacaattttgtgtgtgaaatgaaatgacatgcacttttgggtatatacacttgggtaagtatgattttgggtaataatacttagtacttaagttattctctctactctttgtttttgttttttgtttgttttgttttgttttgagatggagtttcgctcttgtttcccaggctggagtgcaatggtgtgatctcggctcaccgcaacctccgccttccaggttcaagtgattctcctgcctcagcctcccgagtagctgggattacatgcatgtgccaccatgcccagctaattttgtttttttagtagagacagggtttctccatattggtgaggctggtctcgaactcctgacctcaggtgatctgcccacctcggcctcccaaagtgctgggattataggcatgagccaccacacttggcctacctctctactctgccctaagatgcttttgtgggtaaagtgaaaatcacataacagtgcagcttcatcatcatatgccctcaatgttcatcactgttgataaacatgcactgtattatgtttctgtgtgcctttttcttgtgtgccaagtaagacccatggcaggcaccttcattttcaggaagcgaaaatacagatacagtaatatggaaaataggacaaagtgtggacttcaggatgaaaatattgtaacaatcttgctgttgacctcgtagcgctcagtgacataatttgaaaaaatattaatgttcagaaatgttctcttgaggatgaacacacagattgggaatttcgttttgctttggtagattaactagaaacttcacattttcacccttataacctttttggtaatttgaacttttgatcattcttctggaactgctttgacatccacctgaagtttggtttgggtattgagaatgatgatgccattcactaatgtgatctcaaaatgtttactccataatgaggctttctggggagagcagggtagacttccccggttggtccaaatatgactagggaatcggcataggtgactggcttggggtatgatgattgttaagggatagggcttgggcaggggtgcccacttgtggtttgaactttcagctggtgccaaaggagtgggcactgaggatttttcagttgaccagatgggcagaataggaagagggagtgcagaggtgtaaaaggcgttggtgttcagacatcacaaaatgcagtcaactctaggacaactctagcttcctctggaagctcctgccatcttggttaggaaagactctgattttcttcatgataatatcttacgttccttttatagttacagatacaggtctcattgcacaatatgattgttgaaaacacttgtgaaatttttttagtaaaattgcctaagatactttttatagtagacaatgaaaattagtgtgtgggtttataataaatataatgtattatataatatgattaaaatatatttgttataaatatgatattactagaagagcatttttccaaaagctatggaaatgtcattttcccgttacagcatcaagcaatatattccatggttcattttcaactctaataaaattatattttgtgtttatatatgcacgtatagacacatatataatattttttttttacttttttctttttctgtacattgcatccagatgctatgcttgtttgtttttttttttgagacagagtcttgctctgtcacccaggctggagtgcagcggtgtgatcttggctcattgcagcctccgcctcccaggctcaagtgattctcctgcctcggcctcccgaatagctgggattacagacatgcaccatcaccacacctggctaatttttgtatttgtaatagagatggggtttcaccatgttggccaggcatggtcttgaactcctgacttcaggtgatccacccgcttcggcctcccaaagtgttgggattacaggcatgagccaccatgcccggccagatgctatgcttaatacattttttccgaatgtcactctagtgaaaattttaggggacacaaaaatgagactgttgtttggagacaatattttttgacaagagtatgcacaagacaatggcaggtataaacgttttattgtaaatatgaaaaaggaaaaaatgctttcactatattagaggacttgaagtaacgtgaagtgattccaaccctttatctttattttatttatttattttattatttatttttttgagatggagtttcactcttgttgcctaagctggagtgcaatggagtgatctcagctcactgcaaccttcacctcccgggagcatgctgctctatcttttttttcagatgtttgagctattccaggttttttgggatttctgttggtttgttttgttttttgcttttctacataattgtttggataatcttgtcagtatctacgaagtgccttgatagtaaatatattaaccctgtgtatcaatttggggtaatttcacatttttttctatgttgagtttatcaataaattgatattgtatatgtctctatctgggtgtctttgatttctttcatcagcattttgtagttttaaaatcctgagaatgttaaattaacatattttttgactttttttttttttttttgagacagagtcttgttctgttgcctggtctggagtgcagtggcacaatctcagctcactgcaacctccgcctcccaggttcaagcgattctcctgcctcagcttcctgagtagctgggattacacgcgtatgccaccatgcccagctaatttttgtatttttagtagagatggggttttaccgtgttggccaggctggtctcgaactcctgacctcaaatgatccacctgccttgacctcccaaagtgctgggattacaggtgtgagccacctcgcccggttaatgcttttttaaaaccaacaattggtgacctaaattctcactggccttagccctccatgcccctggtgctgtcactagaaaactctctggagctgagcacagggttacctctgtccctcccgaaagaacagggaatagaaaaggagaggatttctattctgctttgtgggccgtcagcatgaaattgcacattctgcccaggcagggctttgcagttcatgtattaacttgcgtcgctttcacagacaatcccagggcttaattaaattgctaaatttagttttttatgtatttatttgagagactgagtctctgtcgcccaagctggagtgcagtggccgtcataactcagtgtaaactcgaactcctgggctcaagcgatcctcccgcctcagtcttcggggtagccgggactacaggtgcccgaccgcacggtcggcttaagattaactttaatagcaggaattttcctggatctaatcattagccgactttgctcagtcccggcaagagtacagttccgagacagctgagttgctccagtctccttgacaggtctccccggcaaaacccggaaaacagaggcactggaagcgaggcggagggaagcgcaagccccactccgccccgcccccgcccccgcccccgcccccgcccccgcccccgcccccgcccccgcccccgcccccgcccccgcccccgcccccgcccccgccccgctcggacccctccgctgcgcgcgcagtttcccacaaacccggaagcggatcgcgtggagtgaaggtcacgccgcggcgcgtgagtttccctttgtgtaaattaatctgcgcttcccaactcccccgcgcttctgtacccgggatctgaggggccacacagaccttgaaatcctcgcaccgctccctctaccccgaccaaattcaggcgtctccgtgagagtcaggcggtcgcttccctgtgtgtttaaatcgctcggcggcgggtcctgtcccccgtccttctgccacagggccatgtagtcacctcctgtcgcggagttttcctgtttcaagtccttcagtgatgcttacatccgccccgcacagcgtaaagtcctcccccgctaggcggattccggtctatgcggtcccccaagcctcgcctttgttggccctggagcacagcgctccaatctcaatccaggagaagccgcgtcttctgcccagtgctgggattctgcagacgccacccatctcttgatccagaccctacctttaccctccttgatacggggccccgctactccccaggcctcctcttcccagacaccgcttctcctaaccctgcgtgtggggaggtgacttactctgtctcttgacatccagtgttcttgcgggccaaataacaccccactgaaaaggtgttctgcttgtggacatcggatcccaattccttccatgtgaatgtgtgcagaaagagagacggagagcgagggagaagaaagagaaaaattttgaaggagaaaagaagattgagggagagccgtaagcagatggcaaagtagagagtggatggaggatttgcagagacagcgaatgaagccgagaaagtagcagggggaaaaaagcaactggagaaatgcagagaaaagttccatctccggagagatgaaggacagcaagatagtgagaggggcagcaaagtgggaagttcctcagtttgagagtgggggagagggggagggatttggagccagggcagacagagcagcgtggtgctgggacagcaagaggagtcagctggtgacaacgagagcagagggagaaccacagcaggtggaggcctgggatctcagggtgccagagagtggggacaagggggtgtaacagaaaagaagggatttaacagagagagcagagggggagtagagtcaggggaagaggcaagaccgggcacagtggctcacgcctgtaatcccagcactttgggaggccaaggtgggtggatcacgtgaggtcaggagtttgagaccagcgtgggcaacatggtgaaaccccatctctactaaaaatgcaaaaattagccgggcgtcagcgcgcgcgtgtaatcccagctactcaggaggctgaggcaggagaattgcttgaacccgggaggcggaggttgcagtgagctgagattgcgccattgcactccaggctgggcgacaagagcaaaactccgtctcagggaaaaaaaaaaaaaagagacaaataggtggagaatgggatgatcaaagattgagcagaaagtttggaagaggggtgaaacaagttgccagaatggagcagaacaggtggaagagaaggaatagaaggaagaaggggagaaacatcaggagaagagaggggctcaaaatgagcagaatcttaggggaaaaataaagggggaaaaaagctagagaaagaaggtgagaatgagagatacgtacagaatgagggagggaaacacagtacccagaaaagagggaaccctgggtgcagatgaacggtgagttgattggatattatgattaagttgtgacattgatttatctatttataatttgataatatgaaatatactttaaaaatacagatgaaaatggatatgcaaaactcctgtctgtaaggctggtgcattttataattcttggcatcagactttagcttccactcacattccctattcaggcacaggtcagtgacttgagtcattcaggtgtgggtcacccactttccttttcctgggatggggtagggtgtgggcgagtgtaaaagatagcaggaaaaccaaagtgtttttcctactcttgcagtcaacacaatagtgaacactcaacacagaatgcttcatatctgatgaacaaaatgtgtggggatttcttcccaccaacaagcaattcgtcagacaccgcctgggtgatccgtaatttcagtcaagttgacactgtctacttgaagttagcatcagatcccacaggttgggggctcagttccacaaggctgccgctacttcacgtgctggttgtaagttcctggttgggacctgaacttcaaccaaacatctaaaaattgaagattcccttgaccctttgctcagattttattaatttgttagcctcattcacagaactcaaggaagcattttgcttagttttacccatttgctatgaagaatattgcaaaagatacagatgactagcccgatggaagaaccctcctagcaaattaatcaaaagaaggggctttgggataccctgattttttttttcttttgttttgttttgagacagagtttcactcttgttgcccaggctggagtgcaatggcatgatctcagctcactgcaacatccatctcccagtttcaagcatttctcctgcctcagcctcccaagtagctgggattataggtgtgtgccaccacgcccagctaatttttgtatttttagtagagacgaggtttcacaatgttggccagggtggaataaatggagttcagtactgtttgaagttccaggcatccaatgggggtcttgggacatcttccccatggatacggggattccagtgtgttctgtctctggtgctgagcaccaaggctctgtgtcctccatttctgagggattacatgagcctgggatccatagagaggagaggaggggctgtgctctgcatggggtttggtcagggctgggtctggccctgaaggggagcttagaccaggccagctccccactgctgcagcgtgcgtgtgggcatctctaggaggggagcaggttctgaagacgagtaaaaaactcacttgttgttcttcctgtaggagtttcttgtctctgcatcaactctggtgcagtgggcagcagaggacatctttccgcagggtgaggtctaacctgtgtgtgtgattgtggcacaggaaaagggtgtgttgattctaagccctaaacagcatatttttgacatttaggattgacttctaaagagtcatgctgtgtgatgaaaaagcccagaagagaaggaagaggaaagcaaaggagtcagggatggctcttcctcaggtgagatgatattctcggtggattgttctgtctcctttctttcagaaacgctgggccttcgagttgggagtcttctctgagtctgaagtgtcctgcctgacaggtttgctcacgcttacctatgccttccctcagtgccgagaccagcttggtcgtggggaccctaacctagtggcactagaggaattaaagacacagacacaagaatagagtgtaaagtgggatcaggggccaacagccttcagagctgagagctgcgaacagggtttgacccacatatttattgacagcaagccattgataagcattgtttctatagattatagattaactaaaagcattccttatgggaaacaaaacattcttagcaaggagtagagaaacagtctttggctaattatctgcagcaaaaacgtgttaaggcacaggccactcatgctattgtttgtggtttgagcagttttccactccgggcaggccaggtgttccttgtcctgctccagtaagccaacagcttctagcagtgtgtgtcatagccatcacaagcacgtttcattgctgcaaaaatcctgcttatggccaatttctttaaagcctgttgccagcatgttcccctttctgtttttgcaaagtgacaaaggcaaaggctgctttgtcacggtgggctacttctcacaggattcgggattcgggatttggatctgcatgctacacaaagacaaacaacacagattaaaagcacaatcatcattgaaatcagggagcctccaattgtcttgatccattttaacgggttaatagctgctaatctgtctgcagctccttcaagctctttagttcctggcattagcatcagatgtgcctgagaggcttggaatacttgttccttcagttttgtaatatctaaagataaatttccagtatgaccctttaaatgtctcttaactctttcctactcatgctctgtttcattatacagatgaggagtaatgcaaaaatcagaagtattccaatcacattgtatctgcattctatattctagactaactacttgatctcctagccgcattacagtttatcggagatcattgatttgattagctagttttcagtctgtgttagtttgggaattccactgcaaagtagaatttttctgccaattatttacgtagtctgctctttgtactgtggaatgcaaagtaactccagctaccgtggcagtagctgtgacagcaatcaatcccataatgattaaaattaaagtggcaatgaaacaccgagagtacctcaaactcttttgaagaatttcagtaatgtatgcacagaaggagaggcttcccaaggacaggaaagctttacaggtatccatactccttctcaggctcttaccactaaaatagaatgatgagtattatacagggaagaattcaagaaaacaatgtacattcttgacaagtcacatgatgattagggagatcaagttttaaatcacttactccaaacagaaaaggaggccttattgtcagtctcgacatggctgcaactggggggtcctcgggttcctcccaaaatctcttcctcagcatctggctcatgataaggtttcaggtgtcttaatggtatccaaatcggctgctggttttggcctggagatacacaagcataacttctaccccaagttattattttacctatttcccaactttttgttatgggatctctccaccaaaccagttctgcttctgtctttgccgctgatttctgtaaatgctgttcagctgctgatagcatttggcctttaggcaggctcaaaaaatttaaagtcaataatgctagattcagttgcataattgcagttccataatcactgttcccccctttgtgtttttgtaattgctgttttagggagagattcattctttccacaatggcttgtccttgtgaattatatgggatgccagtaatgtgtttaatactctatatagagaaaaatgtagctagagcttggctagtacggccttgggtgttatctgttttaataaaagctggaatgcccatcactgcgaagcattgcagaaaatgccatttaacacaggcagaagagtccctcgtttgacaggtagcctaaacaaagtgagaaaaggtatctacacatacatgcacataagccagtttaccaaaagaaggaacataaatgacatccatttgccaaacagaattaggttccaatcctcgaggattaactcctcctgtaaaagatgaggaatgcaccaattggcaagttgcgcattgctggataatagatttagcttctttccaggtaatgctgtatctatgttttagaccagaggcattaacatgggttaaattgtgaaagtgtctggcattagatattgcagtagcaactaggcgatcagccatttgattccctgcagttaaaggtcctggaaagggtgtatgagctctaatatgagtaatgaaaaagggtgcattctattcctaactgtggtttgtaactgggtaaataaagtcattagctgttcatctgttgaaatcataactgagcatttttaattgtgtggaatggactacatatgaagaattagaaattacattgacaggcatcttaaaagcagtcagtaccttaattacagctacaagctccgatttttgagctgaagtatagggcgtgtggaagactttagtttttgatccagagtaagaagctttactgttactagacccatctgtaaaaacattttcagcacttttaattggtttaaatttagtcattctagggagcatctagttagttttaaaaattgaaataattttgtttttggaaagtgattattaagcactcccacgaaatcagctaagtggttttgctaagtaagatgatttataaaggattgttgtatttgtgcctttgtaagagggacaataattttttcagggtcatatccatgcagtttaacaattcaaattctcccattccctatcagagtagcaatttgatccaaataatgaattagaatccatgaattcatatgtggaagaaaaagccattctaccaagtctgcttttggacagtaacaccagtaggtgaatgctaagttggaaaaatcaataaatctaaagccttttctggatctattctatttatttgaggttttatgtacttgtttttcaatgagttgtaactctgcctcagcctcctttgttaattgctgagggctagtgagactaggatctcctttaaggatagaaaatagattactcatgtcataggtaggaatgcctagagcaggttgtatccaattaatgtcccttagtaatttttgaaagtcattcagtgttttcaattgatccttatggttactttctgtggcactactgtagtgtcatttactaaggtccctaagtaggagtaaggagtagtggtctgaatttttgtcaggagctataattaaactggcatgagaaatcgaattttttaagtgatcataatattggagtaatatttcctgagtgggggcagcacaaagaatatcgtccatataatgaataatataacactgaaaattttttatgagtaggttcaattgcttgttctacataagtctgacaaattgttggacagtttaacatgccttgtggcaacactttccaatgaaaacgcttagcaggctgcaggttgtttaccgcaggaattataaatgcaaaccgttcacagccttgctcagctaaggggatagtaaagaaacagtcttttaaatctatgactattaaaggccaattttttagaatcagcaggaaaaggcagtcctggctgcaatgtccccataggttgtataactgaattaatggctctaagatctgtcaacatgctccatttatgtgatttttttcttaataacaaagactggagaattccagggggaaaatgttggagctgtgtgtcctttttctaattgttcagtaactaagtcctctaaagcctccagtttctctttacttagcggccattgttttatccaagttggtttatttgttaaccattttaaaggtataggttctggaggcttaacaatggctgccatgaaaaattatatcctaaaccctggtgggaattttgtccttctgcttgaagtggtttctttaacccttttaaatttttttctaatcccatgccaggcacataccccatctcttgcatcgtatgctgactttgagggctatataattgttctggaatgaacgcttgtgctccccattgctgtaataaatctcttccccataaatttataggtacagcagttacaattggttggctgggtgtggtggctcaagcctgtaatcccagcactttgggaggccaaggtgggttgatcacgaggtcaggagtttgagaccatcctggccaacatggtgaaaccccgtctctactaaaaatacaaaaaaattagccgggcatggtggtgggcacctgtggtcccagctacttgggaggctgaggcaggagaatggcgtgaacctgggaggcagagcttgcagtgagctgagatcacgccactgcactccagcctaggggatggagccagactctgtctcaaaaaaacaaaaaacaaaaaacagaagttacaattggttgaatagtcccagattgttcattgggtccttcacaatgcaatatataactgctttgatatactttaggggctatgccaactccaactgtgttaaatcgagtgggttgaattggccacacggacagccagtgctgtagagaaatgattgaaatgtcctctcctgtatctaccaatcctttaaatttttttccttaatagttatttcacaggtaggatgtttattagtaatttgattcacccagtaagctgctttgccttgtttattcgagcttccaaatcctcctgttcatttagttcatagcacaggagcttccaaatcctcttgttcgtagcacaggagctgtgctatgggctctcctggctctgctttccagggaacagaagtagatataacaatttaaatttccccattgtaatctgaatcaatgactcctgcatgtacttgcactccttttaaatttaaactagacctacctagaagtaatcctactgtccccactggcaaggggtgccacagactcctgttggcactttttgcgggggttcctcaggcagaaagctcacaggttttgtgcagcataaatctactaccagctatggcaggggacaggtattgtatgggggtgagggagtggcctgagctggaaatgccccggtttggaatgaggcctgggacgggcccctcatggcgtttcctgaaatcgggttcccatcttcatcaaacttagagtgacactgattagcccagtgttttcgttttttacattttggacatatttcagggtcagcagatttcttttttcccccaactggcagcctgacttgctggttttttctacattctttttcaatatgatcatgcttcccccagttaaaacaagctccaggaagtggagtatttcctttacccactttcagtcctgccattgcctgggctagcagagtagtcttatgcagattacctccaataccatcacaagctttaatatagtcaaccaaatgtgcttttcccctaataggtcacagagtggcttggcactcaggattggcattgtcaaaaactaataaccacaacactacgtcctgagcagctgaatctgcaatcacctttttaagagactcctgtaatctagctataaaatctgcatacagttctttcagtccctgcttgacagcacttgaagggtattgttccctgcctgaagtgatttttttcccaagctctaatgcacactcctctaagctgctctatggcatcatcccacataaccacttgtgcatctaaaccaccccagccaccgactcccaaaagttggtctgcagttatattaatttgaggttgggcctgggcgttgtgagcagcctggatggaagcttcatctgcccaccaagttttaaattgtaagaactgagcaggagttagacaagctcaagtaagtgcattgtagtcagtaggaatcatttgactggagacagcaacattctttaacagtcccattacaaaaggagaacctggtccatattgattaatagcttgtttaaattctttaagtattttaaaaggaaaaggctcaaatgtagccatcatattcccctgttgatcaggtgggtgtattctaacagggaactgccaagcatccatatcacactctcatctagcttgctggattcctgcctgaatagaaccgagagcagttgcttgaggcgctgctcgaacagtcactagggcaactactttttgtccagtgtcctctggaaaagaaagacctggagggtgaggccactctttttcttcaaaatgatgagggggtgtagacgggtagggacaaacctctccctcctttgctgctttagctggcaaggaaaccttctctgtcacttcttctgtacttcattacactccccttcttcctctgattcctcttccttatcatctgtgtggaaaggctccaaggtggaatgaaccagagcccacactgaccagacagttataggaatatcctcagcgccatccttatatgacttcttcagtgtgctgcctaccttttcccagacctctacattcatagtttctcagtccggataccaggggcaatatttctctaccacactaaaaacctgcatgagtcagctagtgctaacctttacttttccttttctgaggagctgctgaaggagactcaaataagcctcgtgtctgctcgacccttgtcccattgttaccctgatgcttctgagctccccttcttactcaccgcagggattgcttaagagtacttgggtgttctccagtgtagttccacgttctccagccgtcactctggtgacccttcgacaagggtttgagccccatgttaggcgccacttgctcagaccagctcggtcgtggggaccctaacctagtggcgctagaggaattaaatacacagacacaagaatagactgtaaagtgtgatcagggggccaacagccttcagagctgagagctgtgaacagagtttgacccacattttattgacagcaagccagtgataagcattgtttctatagattatagattaactaaaagcattccttacaggaaacaaaacattcttagcaaggattagagaaacaggctctggctgattatctgcagcaaaaacgtgttgttaaggcacaggctactcatcctattgtttgtggtttgagcagttttctactttgggcaggccaggtgttccttgcccttctccagtaaaccaacaacttttagcagtgtgcgtcatagccatcatgagcacatttcattgctgcagaaatcctatttatggccagcttctttaaagcctgtttatgacaggcttagggcctgttgccagcaccgcagtccttctaacctcacttagattccatctcccgttacccagtgacatgaactggggatgaggcttcactgggcatggttctgggaagggctcactccctagcatggatggagatggggtgcgggccccatggtgttagagctgttgggcagtagggattgttcaggggccacatctgacttcaccgtcacctctctgtagaccagaagctgcacgtggaagtcatgtattatgcacaagcacctagtaaattctaggaaaggagtgaaggaaggaaaacgttttctgcttgatttttttcttctttttttttttttttttgagaccgagtcttgctctgtcatccaggccagagtacagtagcgcaatctcggctcactacaacttctgtctccctggttcaagcaattcttgtgcctcagtgtcccgagtagctgggatgtcaggtgcccaccaccacgcccagctaatttttgtatttttattagagatggggtttcaacatgttgtctaggctggtcctgaactcctgagctcaggtgatccacccacctcagcttcccaaagtgctgggattataggcgtgagccactgtgcccagccttcctgcctgatttttactacagttgaagctaaacgcctttcccagttttttatgtctaccttggttcagggaggacgttctctcatcattctcagcatgtgcctctcacagagaccgattttcctttggggagtctcctgcaccagctgtgttaagcaaaaaatgtgataattttgctcagagattggagcagatttttttttttgtcagagaggaggaaatcatattcttgtccacgaattattattatcattttttcaacatcaaattatgtataaatttgtcttataggaaaactccaaatgtacaggttaggccatcaaatacaaaacattccctgtcctaaatgtctatgtgacatgtaaataattgttatgggagggagccttccaccctctctcagtctcactgggacccactcctgtcacctctgtcaggagtgagagcaagtcctgtagaattatatgtatacagcattgtggtgttttaagtaaaattctcagtgattgttttatgatactttattctgtaagttgtgaaaatttactcctttacaacttcatgtgaacgttctctgaattaacaatcagtcacctctctgtttttagtgtctggcttggttcagggaagatgcgctctggtcagcccagctggagactctggaggtccctcgccttgtctgggatgtgtcctctctgggctttgcttgttacctcctcactgaagggggtgaccaggttctgctgaggagtgtccctttctgcacctgctcttcagcctgtgtggggcaataggaagctggggtctgcactgtcacctggtgtctgcctgcattactgctggctctggtttatactggtgcctttgttctcagtggcttcctgacctggggccctgttacttcaatgcttatgttcagacaagacagaaacttgtcccttaggcagttccctgaaaagtcagaaggttggatagacattcccattgttttcctctctcaggagatatctggagtttgtggtatcctctggatgatggcatgtcatgcctgggcaggggttctggtgggcgtgtgtcacattttcacactcagctcccagtaggttgacttggtactggtgcatctctgggtgcagcctcctgagtggcttctggatttctcacaaaagtcagttggcccacgtattcttgtttaatttgtgtccacatggattcaaaatggtccggggcttcctattcctctgtcttgctgacattactcttttagtagagttgcagatttctaacacaggtctggaatgtcttctagttaggggccatttcctaagggagatgtcagatgtttctttcctgtatgtgtcattttataaataatgctgctaaagaaggaaatttttttcaatatatttttttcttttttttaaatttattttcttcttttaattcatttttctttctttctttttgagacagagtcttgctctgtcacccaggctggggtgccgtggcaggatctcagctcactgcaacttctgtcttctgggttcaagcaattctcatgcctcagcctcacaagtagctgagattacaggcacccaccaccatgcccagctaattttttgtatttttagtagagatggggtttcaccatgttggccaggctggtctcgaactcctgacctcaagtgatccgcctgcgttggcctcccaaaatgctgggattacaggcatgatcccagcactgcaccaggctaatatattcttattagttaatatgttaaaatgacattctttgtcttggttaaaataattttgttaattatatacatttttaaatccagctttttcctgcctccaaccccaactaatttttttttttttaacctctctttctggcccctgcccaggcatcctgtgcagtggtgattggctgcagcacagaccagcccccttttccctgccttaaagtcaaggaaatgtctgccatgtttactgctgattatcatgtttcatgagacgttcttgcttaatgatatggttgtttttgttttcaaattttatttttgtccttgtttttaattatctagtaatttcttaagatgtatactgctagccggtcatggtggctcatgcctgtaatcccagcactttgggaggccgaggcgggtggatcacgaggtcaggagatcgagaccatcctggctaacacagtgaaaccctgtctctactaaaaatacaaaaaaaaaaattagccgggcatggtggcgggcacctgtagtcccagctacttgggaggctgaggcaggagaatggcgtgaacccgggaggcagagcttacagtgagccaagatcacgccactggactccagcctgggtgacagagcgagattccgcctcaaaaaaaaaaaaaaaaaaaaaagatgtatactgctgagatattttctgtgacttattttgttgaattattatatcatattaataaattttctgtcatgtattaatgttttattaatggaatatattgataaaccccattgggcttttgtaaataccaaatagataaattttatggacataattattatatttatgtaagtcagggttgatcacatgtgtgtagaatcccagcttcttgggaagctgaggcaggagcatcccttgaatgcaggagtttgagaccaccctaggcaacatactgaaaccccatctcaattttttaaaatattatatataatcatattttttatatcaataaagatgggatctttctatgttgcccaggctgttctcaaacccctgtcctcaagcagacctcccaccttggcctcccaaagtgctgggattacaggtggagccaccatgcccagcctacatttatatttttgaatctgggtatttaatagagattggagttcaactttctgtgttttttcatggtctatcattttttaatggcttaatatacagcaatgtttataaactcaattgagtacaatttatacatttttgttgtaaacatgctgaaatgtacatagcaaaaataacaatgacaggtgggtgcagtggtacaaacctttagttccagatacttgggaggctgaggagggagaaacatttgagccccaggagttcaaggccatagtacactgtgaataagccacctccatgcaacctggacaacatagtgagaccctgtctctaaaaattaaaaaaaaaagtgatgacaaatgtcatctaaaaaataggttattgacagacaactcctatttcagttgatgtgtataagtgtatatgtgtgctagtgtatatgggtctaagtgtacatatatataagtgtggaccgtgatgcgtgttcatgactgcacagatgagcaagcctatggttttattaaagacatgtcatcatttttatgtatttttttaacagttgaaattacatctgaaatattttccatgacctcggaaattgtcgtacaccatcatgttaatgagttgatggctgtgaatagtaacatgggatacatgtgtgtactcatatataattttttttttttttttgacagagtctctgtttgtcaccaggctggagtgcagtggcgcgatattggctcactgcaatctcggctcactgcaatctctgcctcccaggttcaagtgattctcctgcctcagcctcctgagtagctgggattaaaggcacgtgccaccatgcccagctactttttgtattttttagtagagactgggcttcaccacgttggtcaggctggtcttgatcccctgaccttgtgatccacccgccttgacctcccaaagtgctgggattacaggcatgagccaccatgcccagccataatgaccttttatgaaggtccatgattttatccctaaacttgttttaacttttttcttaggtaattgtcaatttacttttgatgctgatctgttcattgtttgattcttttggtttggttctaatgcccggacgcctgggatctggtgcttactttgctgtttttagtccttacacctggggcgagtttcttagggtatctgtgacacagttgtcttctcagtaagacagggacaggtctttctttcatgggcttttgttgttataggagttagtacatgtaaagcatttagaatagtgcctgtcacatggaaagtgttcaaaagcttcagtcattgctattgttatcatcccagttttataattctttttttttttgagacagagtctcactctgtagcccaggctgtagtgcagtggtgtgatgttggctcatcgcagcttctgcctcctgggtttaagcaattctcttgcctcagcctcctgagtaactgggattacaggcacccaccagtacccccagctgatttttgtatttttagtagaggtggggtttcaccatgttggccaggatggtcttgaactcctgacctcaagtgatctgccctcctcggcctcccaaaatggtgggattacaggcgtgagccaccgcgcccagcctataattctttctctttttttttttttttttgtgagatgaagtctcactcttttcccccaggatggactacagtggtgcaatctcagctcactgcaacctctgccttcctggttcaagtgattcttctgcctcagcctcctgagtagctgggattaacaggtgcataccaccacgcccagctaatttttgtattttaattagagacggggtttcaccatgttggccagactggtctctaactcctgacctcaggtcatctgcccacctcagcctcccaaagtcctgggattacaggcgtgagccaccatgcctggcctataattcttttttttttttgaagccactgtggacattgtcatctccaaagacaccacttgtcttgtagtggtggtgatattggtaggtattcagatcaggtagatactgaatatgacttggagtgtcaaaaataatagctaatgcttctatagagataaccatgggttaattttttatttgcatttcttatatgtccacaaaatgagaaatctattttgatttttaaaatataacttcttttggaaaagtataataaaacacaattcacaggccagggtggtggctcacacctgtaatcccagcacttagggaggctgagatgtgtggacaagagttcaagaccagcctggccaacgtggtgaaattccatctctactgaaaatacaaaaattagccaggtgtgatggtgtgcacctgtagtcccagctacttgggaggctgaggcacaagaattgattgaacccaggaggcggaggttgcagtgagccgagattgcaccactgcactccagcctgggcaacagagtaagactctgtctcaaaaaaaagaaaaaaaacacatttacagacacataactacatcacagataccttaatggggattcgtcagaacattctcttcaatccagttaatctttacaactcccttctcattttgagtgaagattaataccctttacatatcctgttggtgaaatgtggttttcattttagggacacttaacattcagggacgtggccatagaattctctcaggcggagtggaaatgcctggaccctgcacagagggctttatacaaggatgtgatgttggagaactacaggaacctggtctccctgggtgaggatcatgcccctgcagaagccgggatctgcccttggttatttcagcattttcccttgtgtgcctcctgggagcccctgcattgtttgactgacattaagcaggagaatcacttgaacctgggaggcagaggttttggtgagccgagatcacgtcattgccagcctgccaacagagtgaaactccgtcccaaaaaaaaaaaaaaaaaaaaaaaaaccaaaaaaacccttattgactcaggctgggatccgtggctcacacctgtaatcccagcactttgggaggccaaggcaggaggatcacttgaggtcaggagtttgagaccagcctggccaacatggtgaaaccccatctctactaaaaatacaaaaattagccgggcatggtggtgggagcctgtaatcccagctacttggaaggctgagtcaggagaatctcttgaacccgggaggtgaaggttgcagtgagccgagaatgcaccattgcactccagcctgggtaacaagagtgaaactccgtctcattaaaaaaacaaacaaacaaacaaaaaactaaaaaccttgttgactcagaaatgaaaagctccatagtgttttctggagttgaaatgtcctttttcttcagatgttctgtccccttcattatacatcattgggtggtaccagggcggaagtatgcataaaaccttttttgtttgtttttgagattgagtcttgctctgttgccctggctggagggcacgtgatcttggcttactgcagcctctgcctcccaggcttaagcaattcgccttagcctccctagtaactgggattacaggcacgtgccaccacacctggctaatttttctatatttcatttttacaatgttggccaggctggtctcaaagtcctgggctcaagcaatccacttgcctcagcctcccgaagtgctgggattacaggcatgagcccccgcacccagctgcataaaaccttatggcaaacttttcagatacccacttccctgttttctactcctgtgctttgttttatgttttgttttttttttttgagacagagtgtttcactcttggaggctggagtgcaatggcgcgatcttggctcactgcaacctccgcctcctggggtcaaatgattctcctgccttaactgctcgagtagctgggattagaggcatgtgccaccatgcttggctaattttttttttgtatttttagtagagaccgagtttctctgtgttggtcaggctgatctcgaactcccgacctcaggtgatccacccgtctcggcctcccaaagtgctgggattacaggtgtgagccaccacgcccagcctctactcctgtgctttatactcagtagttcttggaaaggggcttgatgtctgcatgttataatattccctaagcattcagaaggaggcagtctatggatgaatttgtgaaatattattcttgattcatttgtgatatcctgtctccttcctacacatagggcttggattttggagatgctacagcacattttgatttttttttttacaaacaggaatctctcttcctgacctgaatattaactccatgttggagcaaaggagggagccctggtctggtgagagtgaagtgaaaatagcaaaaaattcagatgggagggagtgcatcaaaggtgtgaacacaggtaagagctcagatgggcatggtggaagccatgctgttgtttgggctttttttttgttttgttttgtctagttttggttttttatgtttgtatttttgtttgttttgtttttgagatggagtttcactgtcatgaaacagagcctgagagacagagcgagactcagtttcaaataaataaataatttttttgtttatttgactggagatctttctttctctctctctctttctctttctttctttctttctttctttcttcctttcttcctttcctttatttgagatggaattttgctctattgcccgggctgaagtgcagtggcgctatctcagttcattgcaacctctgcctcccgggttcaagggattctgctacctcagccttccaggtatctatgattatggtcacctgcaccatgcctggctaatttttgtttgtattttcagttaagacagggtttcactatgttggccaggctggtctcgaactcctgaccttaagtgatctatctgcctctgcctcccaaagtgctagaattacaggcatgagctaccgcgcccagcttctttttgtttttcagatacaggggtcttgctatgttgattttgaacccctaggcttaagcaatcctcctgcctcagcctccataagtactctgattaccggcatgagccatgatgcctagtcttatttttttatttcgaatttagatttaattgatttaccaggaatatttaactaattcccccgacaatttcactgtctcccctcccgctttcttgtctgtttgtgtgaatttcagtattttggatactcaaatggaatcacacagtatttgtctttttatgactggcttatctcacttagcgtagtgtctttcaggttcatctattttgtagcacatcaagaaatttgtatattcttttaggactgaataatattcttctatttgtctgtaccacagtttgtttaactattcatccattggtggacacctgcattgcgcccacctttttattatttttgaataatgctgctatgaacatgggtttttgttgttgttgttttttgagacagtgtctcactgtctcgcccaggctgaagtgcagtggcgtgatcttggctcactgcaacctccaccctctgggttcaagcgattctcctgcctcagcctcccaaacagctaggactacaggtgcacaccaccatacccagctagtttttgtatttttagtagagacagggtttcaccatattggccaggctcgtcttgaactcctgacctcatgatctacctgcctcagcctcccaaagtgctgggattataggcgtgagctatcgtgcctggccttgaccatgggtttttaagtatctcttcaagatgctgtgtttactttcattttatttttcatttgtttgtttgagatggagtttcgcttttgttgcccaggctggagtgcaatggtgcaatctcggctaactgcaacctccacctcctgggttcaagcagttctcctgcctcagcctcctgagcagctgggattacaggtgtgtgccaccacgcccagctaatttttgtattattagtagagacagggtttcaccatgttgactaggctggtctcgaactcctcacctcaggtgatctgcctgcctaggcctcccaaagtagtaacattaagggtgtgagccagtgcgcctggcctttttcttttttatctttatacccagatgtggaattgttgcctatactgatcatttgattttggattctttgagaaaatgtcatacttgtttccatagtgactgcaccatttcaattttccaccaacagtggcacaaaattctcctatttctccatattttcgacaacacttgtgattttctggtgtttcatttttttcccttttcttgacaaaacgtattctatatgggtgtgaggtgatattctttattggtgtgaggaaaaatattcagttttctatttgcatttctctctaatgatttgtgatattttgcattttcttatatggtcgtatatcacctttggaaaaatgtgtatttctttccacatttcttaattcgttatttgttttgctttgtaggacttatttatatatttttattttattattttaaataattatttatttattttttgagacggagtcttgctctgtcacccaggctggatgcagtggcgtgatctcggctcactggtacctgcgcctcccaggttcaagcaattctcccacctcagcctcccaagtagttgggattacaggtgcacaccaccatgcctggctaaatttttgtatctttaatagagatggggtttcactatgttggccaggctggtcttgaactcctgacctcaggtgatctacctgctgcagcctctcaaagtgctgggattacaggcatgagccaccacatccggcctatatatattttagatattaagtttttatcacagatatgatatgcaaatattttctcacatatggtaggttttctttacattgtggtaattgttttcttctatccacaatagttctcaattttgtcatagtgcatcgtgtgtatatttaccttctttcctgtactatcaattttatatctggggaaatgttgaatccaatctcatgaagctttttacctatggttttttctaggagttttatcgttttaggtcatgaatagactttaagttaatttttgcatggggtgtaaagtaagggttcagcctcattcctttgcttgtgggcatcctttttcttcagcactatttgatgaagtgactgtcctttccttgttacatggtcttgacattttgattgaacattattctaccaagtatttgagggtttgtttctggcttctctattcttgctttttttttcatttttgcatggggggatggattctcgctctgtcatccaagctggagtgcagcagtgagatcttggctcactgcaacctctgcctcctgggttcaagtgattctcctgcctcagcctcccgagtagctgggattacaggcatgtgccaccatgcctggctaatttttgtatttttagtagagatggggtttcaccacgttagtcagtctggtctcaaactcctgacctcaagcaatctgcccgcctcggcctcccagaaccctgagattacaggtgtgagccaccacacctgggtcattttttactttaatggagaattttatcctctcatttgggttaccagtactgtctggaatccttttatttcattttgaagggctccctgtagcatttcttgttggacaggtctagagtagtaatgaactttcttagctcttctttatcgaggaaaatctaaatttctcctttatttttgcaggtgacttttgctaaatatagtattcttggttgattttaagcactttcaatatgtcatctcactgccttctggcaggcaaagtttccgctggagaaagtacatagtcttataccttttcctctaaatggcaaatatcttttttgttgctcctgtcaaaattcttcctctgtctttgatgtttgataatttgcttataatgtatctctgtgtgaatgtccttgggttcattttaatttgaatggtcaagcttcttgaattgtatattcaggtctttcttcagaattgggatttggacaattatttggacattatttcttcagttgcaatttctgatcctctgtcttctccttgtgaacctctaataatttgtatgttgttgtgcttgagagcatccgaaaaatgtattagcgtttatttgcttttcttctctgttttttgtttttggtctttgtagctgatactgtgttttttttttttttttttttttttaaattagagtcttgctctgtagcccaggctggagtgtaatggctccatcttggctcactgcaatctctgcctcccaggttcaagcgattctcctgccacagcctcctgagtagctgggattacaggtgcatgcccccatgtccatctaatttttgtatttttagtagagacaggctttcaccatgttggtcaggctggtctcaaactcctgacctagtgatcctcctgccttggcctcccaaagtgctgggattacaagcgtgagccactgtgcctggtggagctgatacttttgaataactgacctttaagtttgctcattctttttggtgctctatccatctgctgttgagcacctaatgaatttttactttatttattgtgtttcagctccagaatgttttttgtttcctcctttgtttaatatcctccttctcatgtattgtttttctgatttcatttagttgtctatctctccttgatatcttttagctcattaagaatcttaaggcagttgctttaaatatttgtcaagggccaggtgcagtgcctcatgcctgtaatcccaacactttgggaggccaaggcaggaggatcacttgagccaaggagttcgagaccagtctaggcaatatcacgagcccttgtctctaaaagaacacagaaaaaacttgctgaggctggatgtggtggctcacgcctgtaatcccagcactttcggaggctgaggtggccggatcatggtcaggagttccagaccagcctggccaacatggtaaaaccccatctccactaaaaatacaaaaattagctgagcatgttggccggcacctgtagtcccagttactcgggaggctgaggcaggataattgcttgaacctggaggtggaggttgcagtgagctgagattgcatcattgtactccagcctgggcaacaagagcaaaactccatcttaaaaacaaacaaaagaaataacaaaaaaccccaaaacttgctgaatgtggtggtgcatgcctgtagacccagctactcaggaggctgaagcaggagagatcgcttgagctggggaagtagatgctgcagtgagctacactataccactgcactccagcctggacgatagagtgagaccctgtcttaaataaataaataaataaatatttgtctagtaatttagagagctgcctgtctttttctaggtttggctttatttattttttagccatatttctctttcctttcataggccttgtaatttttggattaggtttggtaaaataactgcttctctcagttgttttgtataagacttggtcagagggagatcttttctaattagcctgttgtaaagggtgtgggaacactcactccttttctggggatgtgcctttcctagctttgtgcatgtactgttattatgtatactgcttctcttgagtgtcttattttccctagagacttgtcccttctttttctcagaaggtttcaattcctgttctatctctctactcataatccctctcaaactcacctgtaatcctcctgactcctacagatttcccagaactccagtgcatcaccttacccttttctattttcagcacaaccagcgtgatgtacaaagtgtgctgatatttcttccaatgtctgagtcagatgaggcagattctagtattttcatcagactctaaacatgccagaattatggggtctgaattttacttttttcttgctttcctagggagcagctatgcattgggaagcaatgcagaagacaaaccaattaaaaaacaacttggagtatcctttcacttacatctgtctgaactggagctatttccagatgaaagggtaataaatggatgtaatcaagttgaaaactttatcaaccacagttcctctgtttcctgtcttcaagaaatgtcttccagtgtcaaaacccccatttttaataggaatgattttgatgattcttcatttctcccacaagaacagaaagtacaccttagagaaaaaccttatgaatgtaatgagcatagcaaagtctttagagtatcttccagccttactaaacatcaagtaatccatactgtagagaaaccttacaaatgtaattcatgcggcaaggtctttagtcgcaattcacaccttgcagaacattgtagaattcatactggagagaaaccttacaaatgtaatgtctgtggcaaggtttttagttacaattcaaactttgcacgacatcaaagaattcataccagagagaagccgtatgaatgtaatgaatgtggtaaagtcttcagtaataattcttaccttgcacgacatcaaagaattcatgctgaagagaaaccttacaaatgtaatgaatgtggtaaaggcttcagtcataagtcatctctagcaaatcattggagaatttatactggagagaagccttacaaatgtgatgaatgtggcaaggccttctataggattgcgctccttgtacgacatcagaaaattcatactggagagaaaccttacaaatgtaatgaatgtggaaaggtctttattcaaaattcgcacctagcacaacattggagaattcatacaggagagaaaccttacaaatgtaatgaatgtggaaaagtatttaatcaactttcaaatcttgcacgacatcgaagaattcatactggagagaagccttacaaatgtaatgaatgtggtaaagcatttagtgagtattcaggcctttcagcccatcttgtaatccacactggagagaagccttacaaatgtagtgaatgtggcaaggcattcagacacaagttatcactaaccaatcatcagagaatccatactggagaaagaccttacaaatgtaatgaatgtggcaaggtcttcaatcgaattgcacaccttgcacgacatcggaaaattcatactggagagaaaccttacaaatgtaatgagtgtggcaaggcctttagtcgcatttcatacctagcacaacattggacaattcatatgggatagaaactacaaatgcaacaaatgcgtcaaagaatttagtgtgcactcaagccttactacccatcttttattccatactgcaaagaaattttgcaaatgtaaagaatatgacaaggtcttcaaacacaagtttttctaataactcattagagaatttatactggagagacttcacaattataataaatgtgtggaaaagtcttcaaaaaaatttcacaccttgcaaaaggagatctaaaaaacacaatcagaaatgacaaaggggacattaccaccaaccccacagaaatacgaaaaaccctcaaagattactataaacacctgtatgcacacaaactagaaaacctagaaaaaattaataaattccttgaaagatataaccccccaagattgaaccaagaagaaattgcatccctgaacagaccaataatgagttccaaaatttaatcactaattaaaaatctatcaaacaaaactctggaccagacagatttatagttgaagcctacgagatgtataaagaaaagctgttaccaatcttactgaaactgttcaaaaacatggatgcagagggactcctccctatctgattctatgaggccagcatcattctaataccaaaacctgacaggcacaatgaaaaaagaaaacttcaggctggtactcctgacgaatataggtgccaaaatcctcagcaaaatactagtaaaccaaatccatctgcacatcaaaaagctaatccaacattatcaagcaggctttagtgttgggctgcaaggttggttcagtatacacaaatcaataaatgtgatttatcacatacacagaactaaaaacaaaaaccacatgaccatgatcatctctttagatgcagaaaggtttttaataaaattcaacatcccttcattttaaaaaccctcaacaaattacacattgagggaacatacttcaataagaaccatctatgctggactcacagccaaattaatactgaacaagcaaaagctggaagcattccccttgagaactggaaaatgacagggatgaccactctcaccactccgattcaacatagtactggaagtcctaagcttagtgatcaggcaagataaagatatgaaaggcatatataaataggaagaggggaagtcagtttctcttgcagaagatataattctgtatttagaaaacctgttgtctctgcccaaaggctcctagatctgataaacaacttcaaaaaagtttcaggatacaaaatctgtgtacaaaaattagttgcatttctatacaccagtaatgtccaagctatgaaccaaatcaagaatggaatcccattcacagtagccacaaaaagtataaaatacctaggaatacagccaaccaggtaagtgaaagatttctacaatgagaattacaaagcagtgcacaaagaaatcagaaacaataaaaattgaaaaatatctcatgctcatggataggaagaatcagtattgttaaaatactgcccaaagcaatttacagagccaatgctatttctatcaaactaccaatggcatttttcacagaatcagaagaaaacattctgaaatttatttggaaccagaaaagcccaacctaaatagcaaaagcaatcctaagcaaaaagagcaatgtttgaggtatcacactacccaactttaaaccatactacaaggctacagcaactaaaacagcatggtactggtataaaaaaagacacatagatcaatggaataggtaagagaacccagaaataaaggcatatacctacaaccatgtgatcctcaacaaaactgacaagcaatgaagtaagaacttcattcaataagtggtgctggcataactggctagccatatgcaggatattgaaactggacccctatccttcacgatatacaaaaatcaactcaagatggattaaagacttaaatataaaacctaaaagtattaaattcctagaagaaaacccaggaaatgccattctggacataagtgctggaaaagacttaatgatgaacaccccaaagcaattgcaacaaaaacaaaaattgacaagtgggacctaattaaactaaataacttctgcacagcaaaagaagctatttgcagactacagaatgggagaaaatgtttacaaactgcatctgacaaagatctaatccagaatctataaagaactcaaacaaatcaacaatgagaaaaacaaccccattaaaaactgggcaaaggccatgaatagacctttctcaaaagaatacatacatgtggcaataagcatatgaaaaaaatggttaatatcgctaatcattaaggaaatgcaatcaaagccacaatgagataccatctcagacctgtctgaatgggtattatcagaatgggtattattaaaaaatcaaaacatagatgctagtgaggctgcagagaaaagcaaatacttatacactgctggtgggaatgtaaattaattcagccattgtggaaagcactgcagcgatttctcaaagacataaaagaacatagcattcaacccagcatcccattactgggtgtatacctaaaggaatataatcattccaccataaagacaaacacttgtatgttcattgcagcactattctcaatagcaaagatgtggaatcaacgtaaatgcccatcagcagtagaccagataaagaaaatttggtacatatacaccatggaatactatgcagccataaaaaagaacaagactgtgtcctttacagcaacatagatggagctgaggctcttatcctaagtgaattaatgcaggaacagaaaatgaaatatcccatgttctcacttataagtgggagctaaacattgattacacatggactcaaagaagggaacagtagacacgggcttatgggtggaggttgggaagaggatgaagattgaataactgcctgttgggtactatgctgattacctggggacaaaattaactgtacaccaaactcctgcaacatgcagttgacccatgtacacatactccttgaacctaaaataaaacatgaaaaaaagcaaatttcacaccttgtaaaacatcaaggaatttatattgcaaagaaaccttacaaatgtatgtagcaaagcatttagtgtgccttcaagtcttaatattcatcaggtaatctgtaatgcagagaaaccttacagttgtaatggatatggggctgggcatagtggctcactcctgtaatcccagcacattgggagaccaaggtaggtggatcacctgaggtcaggagctcaagaccagcctggccaccatggtgaaaacctgtctctactaaaaatacaaaaatcagttgggcatggtggcatgcacctgtaatcccagctactcaggaggctgaggcaggagaatcacttgaacctgggaggcagaggctgcagtgagtagagatgaagccactgcactccaatctgggcgacagagtgagactctgtctcaaaaaacaaacaaaaaagatgtggcaaggtctttactcagaattcaaaccttgcaaatcatcacagaatccatgctggagagcaaccttacaaatgcaacatgcgtggtaaggtctttaatcagaattcacaccttccacagcatcagataattcattcacgagagtccttatagagtatggaaaactcttcattatgagttcttatattaatcagcgccagagtgtcgtactagagagaaatcatataaatgtatgtgacacaggctttatccagccccaccaagtcactggacgtcaacacatacatctttgaggaaaccataggctgggcgcagtggctcacacttgtaatcccagcactttgggaggccaaggtgggcggatcacttgaggtcaggagttcaagaccaacctggccaacatggtgaaaccccatctctactaaaaacacaaaaattagctgggcatggtggaatgcacctgcaatcctagctactggggaggctgaggcaggataatcacttgaacccaggaggtggaagttgcagtgagctgagattgggccattgcactccagcctgggaaacagagtgggactctgtctcgggaaaaaacaaaacaaaaccataaagatggattgtggattgtggatgcaaagggtattaatcaaggaccataactattgaacatgagagcactgagcatttacagaagaaataactcagtctctagtacttccgtattaatatatgacatagcatgttgcagaaaaattacaagccaaaagataccaagcctcatgatgcaagggtatgtggaaattgcgatttttattcaggttattaaaatatttaattccttgggagttttggaaaggctactttactctttatgactttcagcctaaacttaaaactctcattatgtgcttttcctacaggcctttcactgtggtctctgggaaagaatcaacagcatgacagggctgattttattagctggggagcatttctatccagtttcctggaagaaggacattgccttttcaggttaaatattgtttgatttagacagcatggaggtgagcagagaataacaaaactatgtatcagtcatcctacttactgtgttcagcaaacctttttcctgacaggcacagtgctataaacctgtacagcaggttacactactgaatactgtaggcaattgtagtaaaatggaaagtatttctgtgtctaaacatagaaaagttaccataagaataccatatgaggccgagcgtggtggctaatgcctataatcccagcacttttggaggctgaggtgggcagatcacctgaggttgggagttcaagaccagcctgaccaacgtggagaaaccctgtctctgctaaaagtacaaaattagccaggcatggtggtgcctgcctgtaatcccagctactcgggaggctgaggcaggagaattgcttgaacctgggaggtggaggctgtggtgagccaagatcaccccacattaaataccatataaaagaaacaaagtgcacctatatagggcacttaccatgagtggagcttccagaactggaagttactctgggtgagacagtgaggagtagtgagtgaatgtagaggcctaggacacactccacactactgtaggctttagaaacactgtacacagctgggcacggtggctcacgcctgtaatcccaactctttgggaggccgagatggctggatcacaaggtcaggagtttgagaccagcctgaccaacatggtgaaaccttgtgaacactaagattacaaaaaaattagccgggtgtggcggcgcatgcctgttatctcagatattcaggaggctgaggtgagagaatcacttgaatccagaaggcggaggttgcagtgagccaagatcatgacattgcactccagcctgggtgaccgagcaagactccatctcaaaaaaaagaaaagaaaaaaaaaaacaaaacactgtacacttaggctatactaaatttattttttaaaaataaagtaattgtgctgtgatgttaccatggctgcagtgtcactaggcattagggatttttcagctccattgtaatcttatggtaccaccattgtatatgtggtcagtagttgaccaaaacatcattatgtgatgcatgactacttattttcactgatgtcctttgccattttaaagtgatggaggtctttgtaccataatatgttaggctaagtaatgggtttctgaaacatgttaagagacaaaatactgtaagactgaagttaaattattactgattacatatcatataatggattaataatgaaggaatatttaatttaggaataatgtaattattgaaattgactgggctgggggcagtggctcacacctgtaatcccagtactttgggaggccgaggcaggcagattatgaggtcaggagttcaagaccagcctgaccaacatggtgaaaccccatctctactaaaaatacaaaaaaattagctaggtgtgttggtgggtgcctgtaatcccagctactcaggaggctgaggcaagagaatcacttgaacccaggagacagaggttgcagtgagtcaagatcacgccactgcactccagcctcagtgacagagtgagactccatctcaaaaaaaaaaaaaaaaatgaggaaaagacaaacactaaaagtggcatctagatttttttttttaagatggggtctttctctgtggtccaggctggagtacagtggcgtgaacacaatccattgttgcttcagcctcccagactcccaagtagcagggaccacagccgtgcaccaccatacctggctaatatttatttatttagtagagacagagtgttgctatgttgccaggctggtttagaactcctgggctcaagggagcctccgaccttggtctcccaaaatgctgggattgcaggcatgagccaccatccaccagattttttttttcttttctttttaacagagaactatcacaagatacatctgaacctgcaaactgccaattcccagatttttttcatctgaaactcatcataatgctaacttttctacaaacagatattgcctaaggccaagagggataatagtttcactataatcagcagacctcagatattttctgtggatagtactgtatccatgaagcatatgatatgcccacctttcagaaaaaaaataagttatttatattgcagccattgcctctcagacattcagttttttgatataattgtcacatagttatatttattcatcatgacatgaaaagaggctctatactgacacctctattatcctgaaaatcatgtttgtaatttttgtaggctggataaacttcacaactacaattgcagtgtgatttaaatatcagataatagtatagaataaaacatcaaccatcaccacaagtgtggattacattaaattactgtcagaggtattagggatttgtatagacgggaggaccaagtgctccagattatttcagcaactcattgggatgtagctctggactagtttaaaatttttttttttttttttttgagatggagtctcactctgtcacccaggctggagtgcagtggcgtgatctcaactcactgcaacctccacctcctgggttcaagtgattctcctgcctcagcctcccaagtagctgggactacaggcacacgccaccacacccagctaatttttgtatttttaatagagatggggtttcacaatgtttgccaggatggtctcgatcttgaccttgtgatccacctgcctcggcctcccaaagtgctaggattacaggtgtgagccgtcacacccagctggacccgtttttatgaagaattttctgacataagcacttctccagattcctgaaggcctccttaccttcacagatgcgcctctcagaacaaaatagaaaatactcaccagactcttttctgctcccaggatggtgggctcagtgtgaaggttataacagccagtatatctgtgagagggagacagccaggccctgagataaaggtttgtgattctgcgacctcacctccccgaagaaccacagttattagtttacctttagcaaaattgcagtgcatgctaggaaagtcaaaaatattttttctaataatttgtttccattctcaattaccagaaacaattacagtgtctagtgagcatctccaaagagactaatgcagtatttagaagaggcttttttatttccatggaccctggaagcagacaggggctcaggtggagagtgcaggacacgctgaggtctgagccatgagggactctcagcaaattgtacacctcacgcgaccttctgcttccttgagttctgctcaaaatctaactttttcctgactctgagaaccatatgcttccagaccccttctagattatgggaaggcaaatgggataccatgaagagaccaagaaggatctattaatgcactaagagtgaaatgaagaatgtgatgtcaataattgatagtctgaaacattaaatggcactttctgatatacatgaatgattaaataaataattgggagataagagacccaactcctatgcagaaaaattccaaataactcttgtagacactccacctccaaggaggtggaatacacataactcccaactccacaaatgcaggctgcacagtgctgcttccttttaaacaatacaatatggcagggagagaatgtgaggatttttatagctgagaaacctgacagacacagcctcagacaggtgatcaaggttgacatccaaaggggattaagtaatgttaatagtatacacctttgataggatgtgataaaaatggcacttctcattggtttttctccccagtatacttaacctttgtctaatcatggaaaacatcagacaaatcccaatagagtggcagtccccaataacacattgacagccctgctacctaaccagtactcctcaaagctgaccaggttataaaaaacaagagtctgagaatctgttagagccaaggggagcctaaagacacataatggttaaatctaatgtggtggcctggacaggatcctggcagagaaaaggtcagggagccgaaggcctgtgggacgtgaccaactcagcattcctctggaggctatatgatcaaacagcaaactgtttatcaagaatgcaggatatgggcaaactcacacttccctgccaccaaaaggtttgctgagggacatgtctcccttgcaccgggctccttgaagttatctaatgagaaatctagcacctattattcaaaggatgcagtcttgcaagcctgctgtgaaccaaacggctgactgacaattacctgacaatcaccctgcctttctcgctctctcttttgcctaataaatatggagggctgtgtaaagctcagagcccttgtccactagaggcaaatatactctcttgtcttttatttccacatttgccccctttgttcaatccccctaggtccatgtgggttacaagtggcgcctgaacagggacagaattgggtgctttataagtggcatcacgaagtggcaccctgaacagcgacagtggcatccaaactcgggactatgaggacataaacgaagaaggtctgctggagcagaggaactgaaattgacaaggtgaacaaggaccccgggacgagtctgccggcagcggatataaggtcagtgccctaaagaggtactgggagcagtgctttaaagaagtactgggaatgggaagttttctgaatcagggtaacaaggggaataatttgtctattgaagaaacattatttgcagttgtaaagttctgttgagacagtctggagctcaggttaatttgcagacactaactaacctcctgcagaagccccaaaaagctattatgcgtaacccatggtttccataggcaagcactcttgatgtggaaaactgggatagagcaggagatggattgaaacaggctcatcaaaaaggttttaaagttgattcttcagttttttccacttggagttcagtttgtactgtatttctgccattatcatcttcttattctgtgggacagcaagctgaatctaaaaatctgaaagaatatgttgctctacccacagctccaactgaaaataaaaaacaggagaaggaggataaaaattgggctatacagcctcctccaattgcagaaacatttgtaccaccaccttcggtggcagaaataagagaccctaatacaaagaattttatgctctgctgtcatagctggagagcccttaggaccttgcacttttcctatttccgtaagacctgatccatataatccacagcagtttattcatgaacacaccccactagaatttaagttgttgaaggaattaaaaactagtgtggtcaataacggagtacaaagcccatggttcctggaggaaggaatgctagacgtagaactctgagaacaagtgaggagaaatcttaacatcaggcgcaaaggcatcaggtccaataaaatctttaatgttacgggctttaattagatcagcctttgctcagttacacacagaagagcctaaaaagaggaaggaggagaaaacatcacttgccttatcacctcctcttccctcagccccagtatcatcaggccaaaataacaaagaggaaatggaagtcttacctaagcctcctcttccaatagataggacaaaggacagaggatacactacagctatcagtccctgtgttaagcaggcaacattagaaggagagctcttaacctgctcagtaatgcaaaatcggcaaggcaatcaggtgtatgtttataaaaagataagaaaaaacgcattagaagccgaaactgcgcagccaagcaggcagtaggtggaagaaaaggctcagcagcagaaaagctcccggtaaccaagccgacaaggcctgcccaggctggcaacatccccctggcaaaggagggagggaccggcgcagacacaggcaaagcctaagaaagtacaacatggctgcctcccaggacctgcaccgctgccctctggctctgtgggcagcccgtagcaaaatttcatgtgttacgtcccaggctatgattctctgctaagatttaagtaaaatgtaagaatttgaaaaacctgctttctaataatggtcactgttgttacctctcttctatccctgacgtagctttccaaattcaatttaagtaaaatagtaacctctgaagggagagagattacagagggcccatgaattagttaaagagtaattaaaagctaggcatgtaaaaccacacattactctttaaaggagaactttaaacctaattaaatggtatttgttaaattaaaaggtaaaaatgctgtgcccttctcagaaagtgaagaaaagttgtatgtaagtgtagtgaaaaacttatgcatgaatgactgtcttaacctactgattacagatagtctttgatttgtgcttgctaaaagagtcctaaattgagttctccagctatggagtcactgttttcaagactgtttgccagattaaactccataaacttggtcacatcccacaggccttcagctccctgcagaaaagaacatgagttaaaaccaaagaaatcagaataaattatgaataagttgatggtagtatatcaacaatggtttataaactgtaaaacccatacaaaactagtataagatgttaataatagggaaaacgggtcagggtatatggaacttgtctaccttttttgaattttttaaatataaatctataaatcttctaaaataaagtgtattagttttttaaataactaatttaggccgggcttggtggctcacgcctgtaatcccagcactttgggaggccaaggcaggtggatcacgaggtcagaagttcaagaccagcctgaccaacttagtgaaatcccgtctctactaaaaatacaaaacttagccaggcatggtggcacgtgcctgtagtcccagctactcgggaggctgaggcaggagaattggttgaacccgggagttggaggttgcagtgagctgagattgcgccactgcactccagcatgggtattggagtgagactttgtctcaaaaataaaataaaataaagtaatttataaaattaaatgaatattgactggaaacacagatgaaacaaattttctaggaaaatgtactctaccaattttgacagtagtagagacagaaaatctaaacagaatgtaagatgaaacatataagatgatttaacagagaaattgcaccaatctttcaggcaggagaatcacctgaggtcaggagtttgagaccagcctgtccaacatggtgaaaccgtgtctgtactaaaaatacaaaaattagccaagcactgtggtgcaagcctgtagccccagctacttgggaggctgaggctggagagtcgcttgaaccggggaggcagaggctacagtgagctgaaaccgtgtcactgcactccagcctgggtgacagagcaagactctgtctcaaaaacaaacacacacacacacacacacacaatgtaatttacatctattttttaaagttattggtttttttaaaagcaacagttgggccgggtgcagtggctcacccctgtaatcccagcactttgggggccggggcgtggggggggggtgtggatcacgaggtcaggagatcgagaccatcctggctaacacggtgaaaccccatctctactaaaaatacaaaaaattaggcgggcgtggtggtgggtgcctgtggtcccagctactcaggaggctgaggcaggagaatggcgtgaacccaggaggcggagcttgcagtgagcctgggtgacagagcgagactccgtctcaagaaaaaaaagcagttggtggtggcctaacatccctccggggacaggacccatcgccgaacgatgggtatggtggcatgtgcctgtagcgtttttaacacacagggaagcgaccgccagactctcacggagatgccccgttcgttctgccttgggccaggtaaatacggattcccaggttggccttaaccctccaacgcgcttggcgttgtccctcggaaactctctagagatgagcactctagagatgactcagtggactgggaaaggcagacccacctcaatttgggtgggcacaatctaatcagctgccagcacagtcagaataaaagcaggcagaagaacgtgaaaacactagacgggcttaacctcccagcctacatctttctcccgtgctggagatcagagatgatgatggaaagggagaagatttctattatgttctgtgggccgtcagcatgaaattgcacatgctacccaggcagggctttgcatttcacattttaacttgcatcgccttcacacagaattccaggccttttaaattaaattgttaaaattagtttttatttacttatttattttaggacagagtctacactgagtatagcactgggtctacactacgcccaggctggagtgcagtggccatgatagctcagtgtagactcgaactcctgggctgaagcgatcctccagcctcagcctctctagtcgctgggactacaggtgcctgccaccacggccggcttaaaattgattttaatagcaggaaatttcctggatctaatcctcaactgacgttgctttgctccggcaggatcccagtttgcagagggctgagctgctccagcctcactgccagcaaaacccggaaaacagaggcactggaggcgtggcctagggaagccccgccccgtcccgtcccggtccgctctctatgctgcgcgcgcgcagttttttgcagacccggaagcggatcgcgtgggtagaaggtcacaccgcagcgcgtcagtttccctttgtttagattcaatctgggcttcccagctcccccgcgcttctgtacccgggatctgagagtcaacacagaccttgaaatccccgcaccgctccctccaccccgtgtaaattcaggcgtctccgtgagagtccggcgctcgcttccctgtgtgttaaaatcgctcggcgacgggtcctgtccccgctcgttctgccttgggccaggtaaacacggattttcgagactcctttccgcttaaaactctttactgacccaacgtcctgccccgcgcttttaaaagtccttaccgcaaggtggattcccgcccggggagcctcccaacctcgcccccggcccctgaagcgcagcgccgcagccccagtcccggcgggggaggccgcgtcctgtactgggtcctgggacccttgagaccccacacttctaataattcagccccacccttttcctccttgatccgggccttcctactccccaggcctccccttcgcagccatcgctactcccgacccccgggtgtggggacgtgacttcttctgtcttaggacattcaggattcttcgtcccaaattccatcccactaaaaatgtgctcttggcggaggtgggcaccttattgtactcccctgcctatggatgtgtggggaaagatggtgaaagagtggcaggaaatagaaaaattttgaaaaagaagcatgagggagatccataagcagacggcagagagtagctgagagatttacagagacagtgaatgaagccgagaatgtagcagggggagaaaagtaactggagaaatgtagagaaaagctgggtctccagagagatgaagatgaagcaagattgggagaggggcagaaagggggaggctcctcagacagagtaggggagaggaggagggatttggagccagggcagacagagcagcatggtgctgggacagcaagagggggcagctgatgacaaggagagcagagggagaaccacagcatggggaggcctgggatccgggggggccagagagtggggacaagagagtgtagcagggaagaggaaatttaacagggagaacagagaggaagcagagatagggagggcaagaaacaggcagaatggaaattggggacaatcaaaaattggacacaaagaggaacaaggggtaaaacaaattgccagaatggagcagaacaaatggaagagaaggaatagagggaagagggggagaaacagcaggagaggagaggggcagaaaaataagccaattcttatgggaaaaatgaagtgaaaaaaagcaggagaaagaaggtaagaatgagagagctgtacagaatgagggagggaaacatactaatgacaaaagagggggaacctgagtgcagatgagcgatgagttgatggactattatgatcaaattgtgatatactgatttctctaattgtaatctaataagcacaaaatttatttcaaaagtacagatgaagatgagacttgcaaagttcctgcctataagggaagtgcattttataattcttgacatcacaagttagcttccattcacaatccctgttcagccagagggcagtgacttgcctcattcgggtgtgggtgagtgggtaagacaggaggaaaaaccaaagcgtttttcctacgcttacaatcaacacaatagtgaacacccaacacagaatgccacatctctggtcaccaaaatgtgttggggattacttcccacccacaagcagttcatcagacaccacctgggtgttgtgtaatttaactcaatttcacactaacactatctatgtggagttagcctcagattctacaggttgagagctcagttccacaggcatgctcccacttcaggtgccacttgcaagtcctgggttgggacttgaaccttgtgaccaaccaactatgaaccgggggttcccatgaccctttcctcacattttgtgaatttgctagagtggttcacagaactcagggaaactttttgcttagtttcacccatttgttacaaaccatattacaaaggatacagatgaacagccagatggaagagccttcctagcaaactaatcaaaatgaggggcttttggaccaggcgcagtggctcttgcttctaatcccagcactttgggaagccaaggtgggcagatccacttaaggtcaggagttcaagaccagcgtggccaacaaggtgaaaccccatctctactgaaaatacaaaaattagctgcgcatggtggcgtgtgcctgtaatcccagctgcttggctgagacacaagaatctcttgatcccaagaggtggaggttgcagtgggccaagatcgcaccactgcagcctgggcaacagtgagactctgtctcaaaaaaaaaggaggggctcttagtaaacatgtttttttttctttgagacggagtttcggtcttgttgccctggctggtgtgcactggcgcgatattggctcaccactgaaggggtggcctgcccctccacacctgtgggtgtttctcgtcaggtggaatgaaacactcagaaaaagaaagagacacagagcaaagtacagagaaagaaaagtgggcccaggggaccggcgctcagcatacggaggacccgcgccggcccggtctctgagttccctcagtatttattgatcactatctctaccatctcggagagggggatgtggcaggacaaaggtaatagtggggagagggtcagcaggaaaacatacgaaccaagatctctgtcataaataaggaaacgtgctgtgccttgatgtgcatgtatacaaacatcttggtgcagtaaagagcagtattgctgccagcatgtctcacctccagccctaaggcggttttctcctatctcagtaaatagaacatacaatcaggttttacacctagacattctattgcccaaggacaagcaggagacagatgccttcctcttatcttaactgcaaagaggccttcctctttcactaatcctcagcacagaccctttatgggttccaggctgggggatggtcaggtctttcccttcccatgaggccatatctcaggctatcacatggggagaaaccttggacaatacctggttttcctaggcagagttccctgcggccttccacagtgtattgtgtccctgggtactcgagactggagaatggcgatgacttttaccaagcatactgcctgcaagcgctttttaacaaagcacatcctgcacagccctaaatccattaaaccttgagtcaacacagcacgtgtttctgcgggcacagggttggggctagggttacagattcacagcatctcaaggcagaagaatttctcttagtacagaacaaaatggagtctcttatgtctacttctttctacatagacacagtaacagtctgatttctctttcttatccccacacaccacaaccattgcctcctgggttcaagtgattctcttgcctcagcctctccagtagctgggattacaggtgcccgtcaccatgcctggctactcttgtatttttaatagagatggggtttctccatgttggtcaggctggtcttgaactcccgacctcaggtgatccacccgccttggcctcccaaagtgctgggattacaggcgtgagccaccgatcctggctggaaaccatgctttttatctgcatctaaactgaggggcagccttgtgggactgcacctttaacccgtggaatctgtgcctatctccaagtagacagtagcaaagttgagttaacctgtgggacacacagctgcgagcgtgccacagaactggtcagcacgggccagacgcgttggcttaagcctgtaatcctaacactttgggaggctgactcaggcagatcacttgaggtcaggagttcgagactagcctggccaacgtggtgaaaaataaaaaattagctgggcgtagtggcttgtgcctgtaatcccagctactcaggaggctgaggcagggaattgcttgaaccctggaggcagaggttgtggtgagctaagaccgcgccactgcactccagcctgggcgacagtgaaactccgtctcaaacatgggggaaaacacacattttggtgatgggcggcatagtattctgtgctgaatttgagtgtagtaaaaacagttatcttttttccttacctcaaacagtaaagggaagagacttggcccaccagtctcagggcctgtgatgtctactcaatagtgatggaatgatctgtccctgctcctggctgctgctgatcctgagactgtacaccatgtgccagccccacttacagtctcagagtggaatgacatccctcctctatggtgtcgttaatttttttgtctaggaaattattattattattattattattatttgagacggagtctcactgtgtcacccaggctggaatgtaatggcgcaatctccactcactacaacccctgcctcccgggttcaagcgattctcctgcctcagcctctcaagtagctgggactacaggcacacgccaccacgcctggctaatttgtgtatttttagtagagacggggtttcaccatgttggccaggctggtctcggactcctgacctcaggtgatctgcccgccttggcctcccaaaatgctgggattacaggcgggagccactgctcctggcctagggaattattttggtcagcatactgaaatggaggtgttgtccactgaaacacacacactcacatactcactcactaaagccttttcgttccatttttcaatctttaaaacaaaaaatactgtatttactacatttctccctgcagtaagtacccctcttgcatgctctatttaagatcacagtacactaaaatcttgtttatattctctcttcaattcttgcccctagttcttggttgactccatccaatcaagttatcgcatccacccattccattgctcctgcgacctgtttctaaatttatttttatttttaaaaagttttattttttatttttattttttttgagacagagtctcgctttgtcatcaggctggagtgcagtggcacgatctcggctcactgcaacctctgcctcccggattcaagcgattcttctgcctcagcctcctgagtagctgggattacaagcacacgccaccatgcgtggctaatttttgtatttttagtagagacggggtttcaccatgttggccaagattgtctcgatctcttgaccttgtaatctgcccgcctcggcctcccaaagtgctgggtttataggcatgagccaccgtgcgtggcccctaaatttatttttaattaattatttatttttttaagggacggggcctcactctattgcacaggctggagtgcagtgaggcaatcatagctcactgtaacctcgaactcctaggctcaaatgatcctcctgcctcagtctcccaagtaggtaggactacaggcatgcaccactatgcctggctaatatttttatttatttacttatttatttatttttgagacagggtcttgctcccagtctcccaggctggagtgcagtggcataatcacagctcactgcaacctcgacgtcctgggctcaaacaattctcccacctcagcctcctgaatagctgggactacaggcccatgccagtatgccactaatattttggttttttatagagttggggtcttgctatgttgcctaggctggtctcaatttcctggcctcaagcgattctcccatctcagccacccgagtagccaggactacaggtttgtgccactgtgccatgctaatattttgatttttgtagagttggggtcttgctgtgttgtccagactggtcttaaactcctgagctgaagtgattttcccacgtcagcctcccaaaatgtatccagatggaggcatcattcattaaaacacattcctacataaaataaaggttttattttccttctactcttctatctttaaaacaaaaaatattatattaactacatttcttcctctaggaagtacccctcttctgtgctcccaaatctctggaattacaaggatgagcccctgcaccaggcttaatagtttttaaatttttgtcctcatctttctttccctgtcagcagcaatttgcacagccgatcactccctcttcttttttcttggctttgaagagattcttcataatttaaaaaatctgtttaactttttttttttttttttgagacggagtcttactctgtcacccgggctggagtgtagtggcgcaatctcggctcattggaacctctgcctcccgggttcaagtgattctcccacctcagcctcctgagtagtcccgagctgggactacaggtccgtaccaccacacctggctaatttttgtatttttagtagagatggggtttcactgtgttggtcaggctggtcttgaactcctgacctcgtgatccatccaccttggcctcccaaagtgctgagattacaggcgtgagccaccgcgcctggccctgtttaacatttttgtcatcaccttcatgtctcctgaactgtcttctgtgaatatgggagtgtcccacaatttagtccttaaacctgttctctctgcccacaccctctacctttccttatgatctcgtcttacagcttcaaacaccacctgcctgtctccattttccctctccacccacccctctctcctgaattccagaatcctgtgtccactcgtgttctggacatctctgctggggcatccacaggcatctccaccttcatatgtccaaaagagaccctgaactccccaaacacgtatccccagcagtcctgcacatatcagatgagggacaccctgtactttctgggaattaagtaaacctgtcaaatgtatttaaaatgtaggagatattttcttatttgtgttttcatttataatacaaacaataaatcacatgtttacttacatgcctgtaatcccagctacttgggctaaggcaggagaatcgcttgaacccagggggcagaggttgcagttagccaaagatcacgccctgcactccagcctgtgcaacagaatgagaccctgtctcacaaacccacacacaaaattatccggctttggtggcaggcgcctgtaatcccagctactccaggaggctgaggcaggagaattgcttggacctgaggcagaggttgcagcgagccgatatcatgctattgcacttcagcttgggtgacagagtgagactgtctcaaaaaaaaaaatgtatttgctcagttaggatggaaataggcctgtatggaaagtacagttaatgtttgagttgtaccttgatacaagcagtttcttgggagaaatggcatccagcccagtggagacccgcaagaacaggtcatgtccatacattcccgctagagggcagtgctggtgttggtcgaggcttcggaggtcaccttgaaggctaacggtgtgatcattggagaacagctggcatacagccacgtctcagtgtaggctgcaggtcttcagagaggcccctgacagcagagtgtgtcgcagcctctggtctcacagtgcctgtcaacctcttgaatttctgtgtattttgaattccagtagtcgaggtcagaatctcatatatggggtctgagaaggtgccatataacattctccaggggagctgggaatccaaccacattctctggggtgggagggaagtttactccatttcctatttatgggggctgctaaggggtgatgcatcactcgtgaaggaaggaggaacacactccaagttcttatcacagcacacaagtcattcatgtagcaaactatgtaagtggaatcatttgaaacctacataacagggggcccaggtttctcctgcctcagagacttcatctgggctgttcctctgcctggaactctctggcccctcagctgcaggtgacaaacacccttccttccccaggcctttgttctggtagtaccttcttaggattctgtgacccccccatagcccccgatttaacactccagcctgaccccaccccaactctcctccattttgaagctgtgtgtgtttctttctttcccttttcctgccactgtctggatcctggtgacagcaaggacccaaggggagagacgagccagaaggtggggactgtgctggctcaacccctctgagtggagctcagccctagtctcacatttgagagctgaggcattttgcagaaacatctcttgtgcctccttacagagattctgatttcaatactcaggtggaggccaggcctaatatttaaagctgatgctacagtagttgctccctatctgctggtttgatttctgtggttccagatcctcgagtttaaccgtggtctgaaaatattacacagaaagttccaaaaatgaagaatgtacaacttttaaatttcttgccattccgagtagtgtgctgaaatctagcactgtcccactctcttttgtttttgaggagtctccattgcccaggctggaacgcagtggtgcaatatcggctcactgcaacctctgcctcccaggttcaagtgattctcatgcctcagcctcccaagtagctgggattacaggcatataccaccacaccccactaattttttgtatttttagtagagacagtttcaccatgtagcccaggctggtcttgaactcctgagctcaggcaatccacctaccttggcctcccaaagtgctaggattacaggtgtgagccactgtacccggccagtcccatgctattttgcccaggactcgaatcatctccttttctggtatatctaggcagtacagtcatccctcagtattggagggattacttccacgacccctgaggataccaaaatcaggtgatcttcaagtcccttatgtaaagttgcatagtacagccatacactgcataatgacattttggtcaacaatcagatctatgatggtggttccgtaagattacactgttacactggagatgagaagttcctgttgcctagctacatcagagtagtcatgacgtcatagtgcagtgcattccttgtgtctgtggtgatgctgggggaaacgaacctagatcgttgccaggcagctttaacctgggtgtgggtgaggatgacactgtgatgctcctagaggtggttcatgaggaatggacgaataagtggttggaactgatatgagaacacatagctgaagaagaggtgagaagataggaaagtgaaggaaaagaaaaaaaaaatccaggaactttcacagtgaagggtttagcagaaacttgtacagacctcaacaagcttcttaaaaagtttgaaaacatgaactccaacaccaataggtgtttatttatttattttatttttatttttatttttttttggagatggagtctcgctctgtcgcccaggctggagtgcagtggggtgatctcgactcactgcaagctccgtctcccgggttcacaccattctcccacctcagcctcccgagtagctgggactacaggcgctcaccaccacgcccagctaattttttgtatttttagtagagacggggtttcaccatgttagccaggatggtctcgatctcctgacctcgtgatccacccgccttgacctcccaaagtgctgggattacaggcgtgagccactgcggccagcttattttattttttgagacagagtctcactctgtcacccaggctggaatgtagtagtgtgatcttggctcactgcaacctccgctttctgggttcaagcgattctcctgcctcagcctcctgagtagctgggattacaggtgcctgccactacacccggctaaagtttgtattttgttttttttgtttttggttttttttgagatagagtctctctctgttgcccaggctcagctcactgcaacgtctgccttccgggttccagcgattctcctgcttcagcctcctgagtagctgggattacaggcatgcgccaccatgcccagctaatttttgtatttttagtagagacggggtttcaccatgttggtcagtctggtgtcgaactcctgacctcgtgatctgcccgcctcggcctcccaatgtgttaggattacaggcgtgagcatggggcccagactaacgtttgtatttttactagaggcagggttttaccattttggccaggttagtctcgaactcttggcctggtgtgatcagcctgcctcagcctcccaaagttctggggttacaggcgtgagccaccacacccaaccccaaaaggtgtttattaatagaaaggaaagtttatggtgcattacctgctcacaagaacatttaggaagaaaaaataagcaagtaaaccaccatagatatttttcttcctctctcgttttcctaatcagctgatttatttttttattttttgagaccgagtctcgctctgtcaccaggctggagtacagtggtgcggtctcggctcactggaacctccacctccagggttcaagcaattctcctgcctcggcctcctgagtagctgggactacaagcctgtgccaccactccgagctaatttttgtatttttagtggagatggggtttcaccatgttggccaggatggtcttgatctcttgacctcaagatctgcctgccgcggcctcccaaagtgctgggattactggtgtgagctactgcaccaggccctcagctaactttcagattcacaccacagacatatttctgaaaggagtgccttctctcctagaagagcctcgggcaagttcttcaagaggtatccagaagaagtcattgttatcccagatgacagctccatacatgttattgctcctgaggaccttccagtgggacaagatgtggcactggaagacagtgacattgatggtccccaccctgtgtaggcctaggctaatgtatgtgtttgtgtcctggttgttgacaaaaaagttttaatggggaaaaagattttaaatgggaaaaagcttatagaataaagacatgaagacaaaatatttttgtacagctatataacgtgtgttttaagctaaatgttattgtagaagtcaaaaagtttaatttagaagtttataaagtcaaaaagttatagtaagctaaggttaatttgttattgagaaaaaaatattttttatgttagtgtagcctaaatacacagtaagtatgtatttatttttgagacagcctctcacactgtcgcccaggccggaatgcagtggtgcgattatggctcactgcagcctcaacctcttaagttcaggtgatcgtcccaccacagcctcctgggtagctgggactacagatgtgttccaccatgccttgacttatttcttgtatttttttttgtagacacaggagtgttgccatgttgtccaaactggtctcgaaattctggagtcaagcagtctgcctgcctcgttctccaaacgtgctgggattacaggcatgagccactacgcctggccaagtattcggtatttataaaatctacagtagtacacagttatgtcgtaggccatcacattcggtcaccacacactcactgactcatccagagcaatttctagtcctgcaagcgccattcatggtgagtgccctagacagctgtaccattttttaaacatgtatatcatattattattgtaccttttctatgtcgagacatgtttttatttacaagtacataccattgtgtcacagttgcctgtagtattcagtacataacatgatgtacaggtttttagcaataggctataccatataccctaggtgtgtagtagactataccatcttggtttatgtaagtgcagtctgtaatgaaatggtctgaaaacacatttctcagaaccggtcccattactaagcagtgcatgactgtatttgcatataaattacacatgtcctcccgtagactttaaatcatctcttgattacttataatggattatttttaatggattaatgaaatttataaatgctatgtagttgttatactctgttgttttcttgtattattttcattgtttgttactttttggtttctttccttttttttgtaattatttcagtctgtcgttggttgaatccctggatttggatcctagaaatactgagactgagggccgagtgtagactctatctgctcattagtcagtgaatagtcttctttttgatctgctccacttttggggtacctcagtccttttgtttaacccttattttacttaacagtattccccaagcacgtgaatattgatgctggcaatttggatgtgccagtaagaagctgtcacatgcataatttaagtggagtaaatagaggtcagtactgtttgaggttccaggcatccactgggcatcttggaacatatcctcatggatacggggattccagtgtgttctgtctctggcgctgagcaccaacgctctgtgtcctccatttctgagggcttacatgagcctgggatccatagagaggggaggaggggctgtgctcttcatggagtttggtcacagctgtgtctcttccctgaatggggcagctcagtccagcctagctccctactgctgtagcgtgtgtgcgggcttctccaggaggggagcgagtcctgaataaaagagtaaaaatttcactcattcttcctgtaggaatttcttgtccctgcatcaactctggtgcagtgggcaacagaggacatctttccgcaggattaggtctaacctgtgtgtgtggttgtggcatagggaggggaatgtgttgattccgagcagtaatcagtgtatttttgacatttaggattgacttataaacagtcatgctatgtgatgaagaagcccagaagaggaaagcaaaggagtcagggatggctcttcctcaggtaaagtgatattctcggtggttggttctctctgtttctttctgaaatgcctgaagcatcctgcctgacacgtttgctcacactcacccatgccttccctcagtccctttcatctcgcttagattctatctctcgtgacccagtgacatgaatgtgggaagagactgcactgggcgtggtcctgggaagggctcacacccagacatggatggagacggggtgagggtcccgtggtgtcagtggtgttgggcagcagggattgttcaggggccacatctggatgcactgtcagctctctgtggaccaggattagagaggctgccaatggaagtcacgtatttttttttttttttttgagacagagtcttgctgtgtcacccaggctggagtgcagtggcacgatctcgactcgctgcaacctccgcctcccgggttcaagcaattctgcctcagcctcctgagtagctgagattacaggtgcctgccaccacgcccagctaattttttgtatttttagtagagacggggcttcaccatgttggtcaggctggtctcgaacccctgacctcgtgatccacctgcctcggcctcccaaagtgctgggattataggcgtgagccaccgcgcctggcctgaagtcacatattaatgcacacaagtacctggtacattctggaaaaggagttcaggaaggagaaatcttttctgtctgatttttactacatttgaagctaaacacctttcctactttctaatgtctggcttggttcagagaggacattctctcttctttctcagcatgcccctcccatggagactggtgttcctgcagggagtcttgtacagcatctgtgttaggtgaaaaaagctgtaattttgcacagagattggagcataaattttttgtcattaaagaggtggaaattatattcattcttgttccagcaattagttatttttttatgttaaacatcaaattatgtatatatttgttttataggaagacaccacacatgcagcttaggccatcaaatacgaagcctcccctgccctgccctgtgcagtttcccaccctccctgcgtctcactggtgacccactgctgtcagctctgtgtcaagagtgagagcatgtcctgtagaaatatatttatacagcattggccgggcgtggtggctcacgcctgtaatcccagcactttgggaggccgaggcggacagatcacctgaggtcaggagtttgagaccatcctggccaacatagtgaaaccctgtctctactgaaaatacaaaaatcagcaaggcttggtggtgggcacctgtaatcccagctaccacagaggctgagacaggagaattgcttgaacctgggaggcggaggttgcagtgagccaaggtcacgccactgcactccagcctgggcgacagagcaagactgtgtctcaaaaacaaaacaaaacaaaaaaaacctatacagcattataaggctggacgctgtggctcatgcctgtaataccagcgctttgggaggccaaggtgggtggatcacctgaggttgggagtttgagaccagtctgaccaacatggagaaactccatctctactaaaaacagaaaatgagtcgggcatggtggcacatgcctgtaatcccagctccttgggagactgaggcaggagaatcgcttgaacccgggaggtggaggctgcagtgagccaagatcgcaccattgcacttcagccttggaaacaagagcaaaactccaaaagaaatatatttatacagcattatggtattttaaataaaatcctcagtgattgtttcgttgtaatattttataccaaaagttgtgaaaatttgcatgttttcatgttaggaagatggattccttgctcctttacatcctcatgtgaacgttctctgaattagaaattagtcaccttggcaaggtgcagtggctcacgcctgtaatcccagcactttgggaggctgaggcaggcagatcacctgggctcaggagttcgagaccagcctgaccaacatggtgaaactctgtctctactaaaaatacaaaattagcctggtgtggtggtgcacacctgtaatcccagctacttgggaggcttaggcgggagaatcacttgaacccgggagatggagtttgcagtgagccaagattgcgccattgcactccagcctgggcgacacagcgagactgtctcaaagaaaaaaaaaaaagaaagaaatcagtcacctctctttttttttgtgcctggcgtggttcagggaccatgtgtgccattcagcccaggaggagtctctggaggtcctgagctttgtctaggatgcatcctctctggactttgcttgtcacctcctcactgaagagggtggccaggttctgctcaggagcttccctttctgcacctgctctgcagcctgtgtgaggccataggaagctggggtccgcaccgccacctagtatctgcccgtgtaactgcgggctctgatttatgctgatgcctttgttctcagtggcttcctgatctggggccctgttacttcagtgcttctgttcaaccaagacagaacgttgtccctcaggagaaatctggagtttgtggtttcctctggatgatggcgcgtcgtgcctgagcaggggctcaggctaacgtgttcatgcattttcccactgggctcccagcaggttgacttggtgcttctttggggtgcaggaacttgctaaggaccttctggatttctcacaaagccaattggtctgtgtactgtttaatttttgtctccagggggacagaaaggtctgtggcttcgcattcctgtgtcttgctgacattactcttttagtagagttgcgaatttcttacacaggtctggagtgtcttttagttaggggccatgtgtatatttgctgagggagaggtaggatgtttcttgtgtgtgtgtgtcatttataattagtgctgctgaagaaggaaacttgttttctttttttattttttttgagatggagtgtttcactcttgttgcccaggctggagtgcaatggcgtgatctcggctcactgcaacctctgtctcgcaggttcaagcaattctgctgcctcagcctcctgagtagctgggattacaggcatgtgccaccacgcctggctaattttgtatttttagtagagacgggatttctctgtgttgatcaggctggtctcgaactccccacctcaggtgatccgcccatcttggcctcccaaagtgctgtgattacatgtgtgagtcaccgcaccgggccaaaacttgctttcaatatattcgtattagttaatacgcctaaatggcattctttgttatggttacaatcctgtcattcgttagttctaacagatcctgctttttcctgcctcctacccccactttttttttcctgttttttttcctctgcttctggtccctgctcaggcatcctgtgcagtggtaattggctgcagcacagaccagtgccctgtttctggccttaaattagaggaaatgcatcccacgtttactgttgattatgatgttttatgagatgttcttgtttaatatcatgttttttttgtttgtttgttttccaatttcattcttggcctgagtattaattatctagtaatttcttaaggtatgtcctgctgagatattttctttgacctttatttgtttgtttattttttgagacggagtcttgctcttgtcgcccaggctggagtgcagtggtgcgatctcggctcactgcaacctctgcctcccaggttcaagcaattctcctgcctcagcctcccaagtagctgggattacaggcgcccgccaccatgcctggctaattttttgtatttttagtagagacagggtttcaccatgttggccaggctcgtctcaaactcctgacctcaggtgatccatccacctcggcctcccgaagtgctggagttacagacgtgagccactgcgcccagcctatttgttaaattagtgtataatattcttaaattttgtatcatgtatcactgttttattaatgaaataaatcaataaactccattgggcttttgctaatacctacatatgtaaattttaatggacaaaagtgtatttataggccagggttagtggtgcatgcctataatcccatcttcttgggaggctggggcaggattaaactcttcccatgaacccaggagtttgagatctttctgggcaacctagtaaaaccccatctgaatttttaaaaatactacatatttttgaatgtgaacatttactagagattggaattgaagtttctatgttttttaatgatctgccatttttaatagcttaatattcaaaaatgtttatcaactaaattgagtacaatttctacatttttagtgttgtaaacaatgtggtcctcattttagggacgcttgacattcatggacgtggccatcgaattctctcaggaggagtggaaatccctggaccctggacagagggctttatacagggacgtgatgttggagaactacaggaacctggtctttctgggtgaggatgacttccctccagaagccgggatctgctctaatctgtctttgcattttctcttgcgtgcctcttgggagcccctaaattgcttaactgaggtagaaaccttgttgactcagaaatgaaaagctctattatgctctctggatttgaaatgcgtcctttcttcagatgtaccgcccccttcataatacatcattgggtggcaccggataaccagttctctgttttctcccctgtgcttacaagtcagtagttcttggaagagatctcagtgtctacatattgcatattccctaagcattcagaaggagccagtctgtgggtgaacttgtgagatattattcttgatccatttgcgatatcccctctcttacctaaacacagggtttgggttttggaaatgccccagcacatcttgtttctttctttttattaacaggaatctgtcttcctgacctaagtattatttccatgttgaagcaaaggagagagcccttgattctgcaaagtcaagttaaaatagtaaaaaatacagatggaagggaatgtgtcagaagcgtgaacacaggtaagagctctgatgggcagtgtggaggccatagtttttatttttttatttttgagccagggtgttccgctatcacccaggctgtagtgcagtggcaatcatagctcactgcagcctcaaactcctggactcaagcaatcctcctgccttggcctcccaaagttgtagattatagccactgcaccttgcaaagccatactattttttttttttttttttttttttgtctcactccgttgcccaggctggagtgcagtggtgtgatctcggctcactgcaacttctgcctcccaggttcaagtgattctcgtgcctcagcctccccagtagctgagattacaggcatgtgtcaccacacccagctaatttttgtgtttttagtagagacggaatttcaccatgttggacaggtgggtctcaaactcctgacctcaagtgatctgcctgcctcagcctcccaaagtcctgggattacagacgtgagccaccacacccagcccatactaactattcaagagtgtgtgggaaactctccaaaggtgggagagttctgtgagaaaagaaaagtttaaatcctaggcattctgaatggaaatatttctttgctctctcttgtcactcagttctataaatgtgtgatagtttcatcttttcaccctcgagtggtgttgccacccagagacaaaagcaaagtctttatcctgatggacagcaccctgtcatgtggcttctgtgaacttttgttccatgattctgaagaacacagggagcattgttgccaggggtctctttcccctgtggtctttcttcctgtacttgattccatctgatgcttagtttctgtccctgtaggtcaaagctgaggtcttcatagacctgcccccttgacctattcatggtccaccccatttcctgtaatgggaagatgtaatcaggaaatgagagaacatgagctactcttttttgcatctgggccctggaaactacaggtgcctccagccccctctgcctgttcaggtctatttggatgggaagaagccagtgattttcctattctcacatgccactcagcacagagcatttcacttctggtcaccaaaatgtgtggggatttctccccatcggcaatttttcactggatctttactgggttttctataattcatttctaacactgtctacctggagttagaatcagatcccacaggctaagggttgggttcccaagcctgtcgcccacctcagccaccacttgttagtagtagattgtcacctttctgtctgaccaacacagctgtaagctgggttccctcgactcccttcttgggttgattactttgctcgggtggctcacagaactcagtgagacacttcattaggttcactggttcatgatgcaggatgtttctaaggatacagatggacagccagatgaggagattcacagggcgaggcacgtgggaagattgactgggtgtgccgccctccaggcgcctgtgtgtcttcagcatttggaacctcttgtgaccccatagttcacgagcggcttcatcacgtaggcgtgattgatattaactcaatctccagcccctctcctagaagctagtgggtggggctgacagtttcatgcttctaagtatggcctggtctttctggtaatcagccccatccaaggaacccacaaaggttgcctcattagagcagatcacactcgtaccacccaggacatctcaaggtcttcagagctctgtgtcaggaaccggggaagagaccaatgtatgtatgtattcttattccacaaggcccctcagccattcttcagttgtgcttcatccacactttactggtgtgtgtcacaggggagtaggtggctcttctgagatgcttactcagctgagtggggcagatagtcaacagaaagaccctgtattcgatccctaggtccccatggggaacatggcacaaaatagcaaccagatgcttctggttttaacactaccatcatttgttcaaaccactgttactttcatcttgtacctttccatgtattataaattaacttggtttttgtatatttagtcagcagttccatatttcatataatactctttgtgtttattattttgtatctgtagggctgtagtatcagggaatggccattgatttatatatttttgagtgtggtttttttaaatgcacagggtatgcctcagcaggagagtctctaaaactgacactccagaaatttttgaataggagtttaaatatttgttttcctttgttgtacgtgacttagtagctactattgaacaacacttttgccaattaaatgtattacagtgtataatatggaaattttttatatcttaagaatatgctgttttaaaattgttgccatcttaatctcagaaataccattacactgacttgccgtaatttgttatttaagactgaggggcaaaactcaaaccgtatcttcctctgtctggtcttgcaccacgcaacaataaacacagacaacttatgtcaccaaatgtgagttttacttccaccaataagcaatcagttctgcagtggctacttgctgggggcccttgaattctattctgatgctgtgtacctggagagcgtgtcacatgccacaggttgagggctcagtctccaatactgccccctttcagacacgggtcataagtccaggcctctggaactttcgaccaactggcttcaaaagttggggttcccatggctccctctttgggtttgattaatttgctagagtggttcacagatctcatggtaatacatacttaacatttacagggtttattccacagcgtattttaaaggctccaggcccggcatggtacctcatatctgtaacccaagaatttttggaggctgaggtgggcgcattacttgatcccaggagtttgagaccagcaacataatgagacgttatctctacaaaaaattaaaaaattggccgggcgcagtggctcacgcctgtaatcccagcactttgggaggcccaggcgggcggatcacgaggtcaggagatcgagatcatcctggctaacatggtgaaaccccgtctttactaaaaatacaaaaaattagccgggtgtggttgcagacgcctgtagtcccagctacttgggaggctgagcccggagaatggcctgaacccgggaggcggagcttgcagtgagcggagatggtgccactgcactccagcctgggagatagagcgagcctccatctcaaaaaaaaaaaaaaaaaaaaaaaaaaatttaaaaaattagccaggcatggtagtacacaccttgtagtcccagctactcaagaggactgctcgagcccaggagtttaaggctgcagtgagctatgatcgcgccactgcactgcagcctggctgacacagagcaagaccttattccaaatagatagagaaggataaattaacagatggaaagaacatagggtcaggtctggaagggtccccagcacaggagcttctgtgtcctggagttggcttgtgccaccctcctggcatgtgtgtgagttcctgctcaccttcctgtcagcctcggggtgttcagctgtccagaagctctctgaacccagtccttttgggtttttatagaagctttattatataatgaagttacatgatataacttcattatttgtctttttgtctttgtatgactggcttatttcacttaccagagtgtctttcaggttcatccattttgtagcatataaagaaatttccatatttttttaggaacaaagaatgcttcttttgctttctttttttgagacggagtcccactctgtcgccgggctggagtgcggtggcgcgatcttggctcactgcaacctctgcctcccgggttcaagcgattctcctgcctcagcctcctgagtagctacaactacaggcatgcgccaccatgcccagctaatttttgtgtttttagtagagatgaggttttaccatgttcaccaggatggtctcgatctcctgacctcgtgatccacccacctcagcctccaaaagtgctgggattataggcgtaagccactgcgcctggcctcctttttctatttgttaatcaggttactggttttctgatttgtaggagttttatgtattttagatatataaaatcttatcagaggtatgatttgaaaatattttctcacatatggtaggtttccttttcactctggtaattgttttcttccatccacagtagttgtaggtcttgtggtagtacattttatgtatttttaccttctttcttgtgttatcagtgttctatccagggaagcattattgaatccaacgttatgaagctttccacctgattttttctaggagttttatggttttaggtcttagttttaggtcatgaattggctttcagataatttttgcatacggtgtaataagagttcaacttcattcctttcttgtggatatccagtttcctcagcactatttgataaagagactgtcctctctcgttacatggtcttggcagccttattgaacatcatttgaccaaatatttgagggtttgtttctggcctgtctgttctagtccattggcttatatgtctgccttcatggcagtacagttctattttgatgaaggtagcttagtaataagttttgtaatcatgcagtgtaacacctccagctttctttctttcaagtttgttttgctattgaggcacatgtgtgatttcatattaattttaggatgagtttatttatgaagaaaacttccttgggattttgctaaagagttcactgaatctgtagatctctttggctattgacatcttaaccttaagacttacaatccataaacatgggctgtttttgcatttgtgtgtgtcttctctactttgtttcagcaattttttgtagatttctgtgtacaaatttttcccgtccttgttaagcttattccctccatatttggaggttttgcatctacagattccacaaaattgcagatcagaaatccacaggtcattgaatctgcacatatggatcccatggatacgtagggcagactgtattttcaatccatggttagttgaatctgcagatatagaaaccacaggtatggaaggcctgcagtaaggaactcaggcatccacagattttgatatctgagagtgttttaagaaaaactctcaaaccatgtttttcctctgctctcacgccaccacaacaatctgtcaagacagaataagacttccgtgaccgacggtataggagttttttcccacacatcaagcaacggacaagagctgggtttcctacagttcagttctgacactatacctggagatagtgtcagatcccacgggttgagggctcagtgtcaaaggcttcccccatttcccaccagttacgagtctgggcctctagaacttctgaccaactagcttccatttgtggtttctgtggcccctctttgggctcgataaagtttctggattgtctcacagaactcacagaaacacttacttacatttgccagtttattataaaggctattgaaaaggatacagatgaagagacctgtagggcaaggtatgggggaaggggtgtggagcttctctgccctccctgcgaccagcatccaggaagctccatgtgttcagccatctggaagctctctaaatgcagtcctcttagatttttatagaaaccttattatgtcagcattctttcccccagacataaagcaggaccctctctcgggaggtcttaagacctataatcagaaagatgggagattagagttctgccttgaggcaggtgaatggagggcaggaaaaggttggagaggttctgtttcctgagttctgccctggggcctaccgtacccaacactataacagaagactgtagcaaaggctatgggagttatgagccaggaactgcagatgaaaacaaatatatatgtaataccataacaccacacaggggttcctggaaccagtcttccctggacaccaagggacagctatattctcaatagaaataatgcaacatgggctttctttttattttttcctaattatgaaggaaaagccttcattatttcaacactgagtatgatgttaccttttggctttttatataaggcttctgtatgtaaagtagattcctcgtattcctaatgtgtagagtgtttctatcatcagtagttgttgatgtttttcaaatgttttttctgcatctgatgagcctatcaagtgggtttttgtttttattctgtttttgtggagtattgcagggatcaatgttcctaagttgcaacatcgttgcattccaggagtgactttcacatgatcatagtgtgtggtccattttaatatactgctgaacttgcttgctagcattttgttgtggatatttgcattagattgatgaggaatattgctctgtagttttcttagagcctttgtgtgccttttctgtcaaggtgacactagccttattgaatgagagagggagtgttttgtccatcacatggaacatttttaagagtgttggtgttaaatcctttttcagtatttgatagcgttttacagtgaagtcatctggttcattacttgtttttgttagtagttatttgataactaattcaatctccttatttgttactcgtcttagtgtttctacttcttcatgagtaagtcttggtgagcagtgtgtatctagaaattcatccattgttgggacacagttgtacaatctcattttcttttttttttttttccgagacagagtctcgctcttgttgcccaggctggagtgcactggcgcgatctcggctcactgcaacctccgcctcccaggttccagtgattctcctgcctcagcctcctgagtagctgggattacaggcgtgcaccaccaggcctggctaattttttgtatttttagtagagatggggtttcaccatggccaagctggtcttgaactcctgacctcaggagatccacccgcctcggcctcccaaattgctgggattacaggcgtgagccactgcgcccggccacaatctcattttctacaattcagttttatttgtaatgtcctctattccatttctaagtttacttatttgaggcttacgcttcatttttgttttgttgtttatctagctaagggtttgtcaatctttttaaaatttattttaatttaaaaattttttttttcaaaagagacagaggtctcattatgttgctcaggctgatctcgaactcctgagctcaagtgatcctcccgccttgccctcccaaagtgctaggattacaggcgtgaaacactatgcccaactgtcaattttcttaccattcgaagtatgagcttgcagtttcatgactttagtgcttctctcttctgttttctaatcttaattttttctttctgctacctttctatttagtttggttttttttatacttcattgaagtataaagttagattgtttacatgtaactttatttatttattttagtgatgaggtctcactctgtctcccacattggagtgcagtagtgcaatcatagctcaattcaaccacaaactccgaggctaaggtgattctcttatctcagcctcctgagtagctaggactacaggtgcatggcactgtgccttgctaactaaaaaataaataagccagcactatggctcacgcctgtgggaatcacactatgggattacgcctgtaatcccagcacttcgggaggccgaggcgggtggatcacctgaggtcaggagttcaagaccagtctgaccaacatggtaaaaccccgtctctactaaaaatacgaaagttagctgggcatggtggcacacgcctgtagtcccagccactggggcggctgaggcaggagaatcagttgaacctgggaggcggaggttgcagtgagccgagatcgcaccactgcactccagcctggtgacagagcgagactccatctcaaaaataaataaatacataaattttgtagagatggtgtcttgtattgttgcctgtgctggtctgcaactcctggcttgaagtactcctcatgcctcaaactcccaagtgccgggattatagatgtgaggcatcatgcctggccatttgtttatttttaatgtaagcacacatttttgttgcattttataagttctggtgtgttctgttttcctttccttttctatcaagatattttaaaaatcagtttgtggtttcttttttgacctattggttttttagatgtgttgtttcatttggacatatctgtgggttttacatttctttctgttaattttgttttattacattataatgggaatcaatactttgtagacttctaaatgtttaaaagattgttttgtgtcataacatgaagtccatcctggaaactgttccatgggcacttccgaaaaatttgtattctgctgtttttaggtgatgtgttgtgtatacgtctgtcatatctaatgaggctatagtgatgtttgagtcctgttttcttcttcttctctttgatttttatttatttatttttattttttagttttaaggagcagggagtttaataggcaagaaagaagggggaagaaagaaagaagaagctcccctgtacagagacagagtgaggggggctccaaagccgagagacagaacccccttctctttggttctatccccttttttttttttttttgagacatagtctcaccctgttgcctacccaggctggagggcaatggtgtgatctcagctcactgcaacctccacctcccaggttcaagcgattcttatgcctcagccacctgagtagctaggattactagaatgcaccactgcatccagctaatttttgtagttttagtagagatgggggtttcgccatgttggccaggctggtatcaaactcctggcctcaagtgatcctcctgcctcagcctcccaaagtgctgggattacaggtgtgagccaccctgcctggtcaccttgttctatccatttttgaaaatgaagtattgaagtctactactatatcgtggagctatctgtttctcctttgaattttgtgaatgtttccatcctatacttaggggctgtgatatttggtgcctatatatttatagttgttatatcttcttggtgaattgaacccttcatcattgtataataacttttctttcttatactggttattgagtaaacgtctgttctctttgattttaatatagacacctctgtgctctgctggttactatttgcatggaatatccttttccatcctttcagtttcagccaatttatgtctttagagttaaagggagtctgtcgtggataggatttagttggatcctgttttgttctgattccaatgggaaatcatttgtatttcacatactcatagagaaggccttaatagtgccatcttgtcacatattagctgtagattttgtaacatcttgtagatttttttgtccttcatttttcccttactgcctgcttttgtattttgttggttttttaattgtgacatgctttgatccccttctcatctcctctggtgtatgtttgtagattttcctcttgtggttaagattgaagttacataaaacattgtaacaataaaacattattttaaaatgtcaacagcttaaccttgattaggtaccgaaagcattacattatagctgtgctatttgttattgtgctagaagttccttctatatatgtaatattcccattaacacattttagtgctttttaaataattttgcctttgaaatgctaggaaagaaaagccaaattacaaatgaaaagtacaataatgcatgatttttttgttttcttttttaatttttttctcatacagtgtcactctcaggatactatgtttccatatttgatcatttattgacctttaatggagaactttatattttcatttgggttagaagtactgtctggggtccttttatttccttttgaaggattccctttaacatttcttgtcagacagttccaaggtactaattaccttcctcagctcttctttattcaggaacgtgtaaatttctcctttatttttgcaagcaagttttgctgaatatagtattcttggttttttgtttgtttgtttgagaaggagtctcgctctgtcgcccaggctagagtgctgtggcgcgatcttggctcactgcaacctccatgccccgccttcccccatgtgaggttcaagtgattctcctgcctcagccttccaagtagctgggattacaggcatgtgccagcacagccagctaatttttgtgtttttagcagagatgaggtttcaccatgttggccaggctggtcttgaacttctgacctcaggtcatcaatccacctcagcctcccaaagtggtaggattacaggtatgagccactgcacccagccgtatttttttttctttaagcactttcaacatatcatcatcttactgccttctagcctgcaagtttgctttaagatgtttaatgataggctgggcacggtggctcacgcctgtaatctcaacactttgggagaccaaggcaggcagattgcctgaggttgggagtttgagaccagtctggccaacgtggtgaaaccccgtctctactaaaaatacaaaaaaattagacgaacgtggtggcgtgcgcctgtagttccagctacttgggaggctgatgcaggggaattgcttgcggaggttgcagtgagctgaggtggtgccactgcactccagcctggggcaacagagagagactccgtctcaaaaaaaaaaaaaaaagaattgtgacaggtgtgacagggagacctttcccaattagcctgttgtaaagggtgtgggaacacctcactcctgggattgtgtctctcctagctttatgcgtatattatactattactaatgtctatacaactgctcttaaatgtcttattttctctaagaggctcatccctgctttttctgagaagctttcagtttctgttctatttttctgcccttaatctttctcaaagtcactcataatcctcccgagtcctgcagattccccactgctccaatgcatcacgtcacccccttgtgttttcagctctcacaatgtgacatgcaaagtatgccgatacttcttccagtgtctgagttgggtgaggctgattctggtccctccaccagacggtaaacatgccagaatcatgggttcatgttctactctttcttcttttctagggaggagctgtgtattgggaagcaatgcagaaaacaagcctattaaaaatcaacttggattaacccttgaggcacatctgtctgaattgcagctgtttcaagccggaaggaaaatttacagaagtaatcaagttgaaaagtttacaaaccatcgttcctcagtttcaccacttcaaaaaatttcttctagtttcacaacacacatttttaataaatatagaaatgatcttattgatttcccattactcccacaagaagagaaagcatacattagaggaaaatcttatgaatatgaatgtagtgaagatggtgaagtttttagagtccgtgcaagccttactaaccatcaagtaatccatactgcagagaaaccttacaaatgtactgaatgtggcaaggtcttcagtcgcaattcacaccttgtagaacattggagaattcatactggacagaagccttacaaatgtagtgaatgtgacaaggtgtttaatcgcaattcaaaccttgcacgacatcaaagaattcatactggagagaagcctcacaaatgtaacgaatgtggcaaagcttttagagagtgttcgggacttactacccatcttgtaatccatactggagagaaaccttacaaatgtaatgagtgtggcaagaacttcaggcacaaattttctctaaccaatcatcagagaagtcacacggcggaaaaaccttacaaatgtaatgaatgtggcaaggtctttagtctgctttcataccttgcacggcatcaaataattcatagtacagagaagccctacaaatgtaacgaatgtggaagagcatttcacaagcgtccgggccttatggcccatcttctaatccatactggagagaaaccttacaaatgtaatgaatgtgacaaagtctttgggcgcaaattatacctaaccaaccatcagagaattcatactggagagagaccttacaagtgtaatgcatgtggcaaggtcttcaatcaaaatccacacctttcacgacatcggaaaattcatgctggagagaattcactgcgtaccttacagatggaatgaatgtggcaaaatctttagttagaattcacacctagcacaacattggaggactcaggagaaaaaccttacaaatatcataaatgtggcaaagaatttagtttgcattgaagcctcatcactcatctcttgatccacactgaaaggaaaccctacaaatgtaaagttaataacatatataaataatctataaagagagaacagttatatcagaatagagcatttaatgaaaactaccagtatagcatattcttgagtaggattcacatttaactgctggcaccgtaatttgtaactctttgatttagaatgtacatacttctcatgttttaagtaataaagtttaaagtttttttttagttttttcttttttttttgagacgaagtctcgctgtattacccaggctggagtgcagtggcatgatcttggctcactgcaacctccgtctcccggattcaagcaattctcctgcctcagcctcctgagtagctgggattacaggcatgtgccactactgcccggctaatttttgtatttttagtcgagacggggtttccctccgttggccaggccggtttcaaactcctgacctcaagtgatccactggccttggcctcccaaagtgctgggattataggtgtgagccacagcgcccggcctagtttaaatttttcttagtgtgaatgaattacatcctttctaccagcgttgtttaatcttacctcaggaggatactttatagtagagaataataacccattatgattttaaggttgaagcagccagaaaagtgtgtgtgtgtgtatgtgtgtgagacataaaacaacatacgcttctgggtgcaatatacttaagtaagtatgatgttgagtaattacacttagtacttgagttagtttctctgtactctggtgtaggatgtttatgtgggtaaagtcaaaatcactttaatagtacaatttcagccttgtacaccctcaaatgtgtgtgagtgttaaagagtatgccctgtattgtgtttctacatgcctctttcttgtgtgccaaataagaactatggtgtgcaccttcattttcatgcagcaaaaatatatagtaatatgacaaatattaggaaataaagtatgggttgagggcaaaaatactgtaacatggccgggcctggtggctcacgcctgtaatctcagcactttgggaggctgcattgggtggatcacgaggtcaggagattgaggccatcctggtcaacatggtgaaaccttgtctctactaaaaatacaaaaaaaaaaaattagctgggcctggtggtgtgcacctgtaatcccagctacttgggaggctgaggcaggagaatcgcttgaacccaagaggcagaggttgcagtgagctgagatcaccccactgcactccagcctggtgacagagcaaggctccgtctcaaaaaaaaaaaaataataataatactgtaacacaatttctttttgtacttctagtgttcagtgacatcatttgaaaatattaatgttcacccatcttctttttaagtcacacacagaaagggaattttgttttggtacattaactagaaacttcatatagtcaccctcacaactcttttggtaatttgaatttttgaccactcttctggaacttgtttgaagtccccctaaggtttggcttggatcttgagaatgatgatcccatacactgatatggtttgagagtgtttattatataatgaggctctgtgggggaaagcagggtatacttttccagctggtccaaaagtggcttcagagaactgggataggtgactggcttggggtgtcatgattgctaaagggtagggctggggcggggatacccactacccatactggaaacttagttacaattcacacctagcatgtatatttttatattttttgtatgtatatatatttttacatttttttcctacattgcctccaaattctatgtttaatacatttcttccctgttttgctctggtgaaaactttaggggacaaataaatgagtgctgtttggagacaaaattttgtgacatgggactgggcattgtggcgtgtgcctgtagtcccagctacttgggaggctgagatgggaggatcacttgatgccaggaggtcgaggctgcagtcagtgagctgtctgcacttcagcctgaaagacagagggagaccatctcaaaaaaaaaaaaaaaaaaaaaaaaaaagttgtgacctgagtatgtccataagacaatggcaggtatacactaggattaatataaatatgaaaaaaaaaaaaaaacttggccgggtgcggtggctcacgcctgtaatcccaacattttgggaggccaaggcaggcggatcacgaggtcaggagttcaagaccagcctggccaacatggagaaaccctgtctctattaaaagtacaaaaaagtagcccggtgtggtggtgggcgcctgtaatcccagctactcgggagactgaggcaggagaatcgcttgaacccaggcggcggaggttgcagtgagccgagatcgcgccacttcactccagcctgggcaaaagaacgaaactctgtctccaaaaaaaaaaaaaaaaaaaaaaggaaattgcacattccgccctggcagggttttgcatttcatattttaatttgcatccccttcataaacaattcaaggactttaaaattccggaaactagtgtttattattcatttatatttatttattttaattatttatttccaatttgttatttatgattatgtatttattaggcgcaaggtttctctctcatgcccaggcgggagtgcagcgcacgacctcggctcactgcagcctccacctcatgggctcaagcgatcctcccacctcagcatccgggtagctaggaccacatgcgagcgcccctacagccgatttaaaattaattttaatagcaggaattttcctggatctaatcatcaacaaactttccctctgccgggacacaatctatttccagatagctgagttcttccagtctccacggcaggtctagcctccaaaacgagacgagctgggagcgaggcggagggaagcgcaggctccgcccaatcccacccgggcctggcctcgcctcgcctctcagctgcgcgcgcagtttcctggagacccggaagcagattacgtggagtgacggtcatgctgcggcgtgtgagtttccctttgtttagattaaatctgggatgctgagtcccctcgcgcttctgtacccggcatctcaggggtcacacagaccttgaaatccccgcatcgctccctccaccccgactaaactcagacgttctaatgagagtctggcggtcgcttccctgagtgttaaaatcgctcggaggctggtcctgtccccggtctttcaccacagggccatgtagacagctcctgtcgcggagtttgcctgcttcaaatccttcagtgacccctagacacggcccgcgctgcgtaaagttctcacccgcgagatggatccacgtctttccggtcccccaagcctcgccctcttttcacaggcctgcccccttttctgtgccttaaatgagaggaaatcgatctgatgtttactgctgattgtgatgtttcagcctccattgggcttttgctaacacctaaataaatatttagtggacaaaattaggttagtgcaaaagtaatggcaaaccgcgatcacttttgcaccaacctaatatttatgggccggggctggaattccatcttctccggaggcccaggctggagaattccttgagcacaggagtttgagaccactctggacaacatagtgagacccccatctcaatttttgaaacatatgtttcagtacgggtatttaatagagattggaattctcgtttctatgtttttacatggtctgactttttgaaatagtttgaaataatgtttataaactgaattgagcacagtttatacatttttattgttgcaaacatgctgaaatgcacatttgcaaaaacaacgacagccaggcacagtggtgcacgcttgtcattcgagttactcggagagggtgtcatttgaggccaggaattcaaggctgtagtgtgccatgaataagccactgcactgcaacctggacacattaaaaaacgaacaaagacaaatatctaaaaaagaggttattgacagacaactctttcagttgtcacatatatgtttactagagtatatgtgtgtgaatgtatatatgtatatgaataagtgtgtacatgtgatgtgtgtggatgagtgcacagatgagcaagtctattgtttttatcaaaggcgcatcatcagtttatatacgtcttatatcttttaacagttgaaattacatcttatatattttcatgaccttaaaattgttctacactgttatgatagtgagtctatggctgtaaggatagtaacctgttatggggatacatgtgcgacagtttcttgattttaatcccggaacttattttaactatactcagttaggtcattgtctgtcaatttacttttgatgctgatctgttattgtttgatgtttttttttttctttttctgagatggagtctctctttgtcacccaggctggagtctcgctttgtcacccaggctggagtgcagtggcaccatctcaggtcactgcaaactctgcctcccgggttcaagtgattgtcctgcctcggcctcccaagtagctgggattacaggtgcccaccagtacgcctggctaatttttttattttcggtagagatggggtttcaccatgtttgctaggctggtcttcaactcctgacctcaaatgatccacctgccttggcctcccaaagtgctgggattgcaggcatgagccaccacgcctggcctaattcttaaagtttgattctaatgcccagactcctgggatctggcgcttactctgccatttttagccttcacacctggggcaagtttcttagaatgtctgagaaagagttgtctcttcaataggatgggaacagattgttcttttatgggcttttgttgttatagccgttagtacatgtacaacatttagaaagtgcctgtcacatgggaggtgttcaaaagcttcatcctggctgggtgaggtagcttacgcctgtaatcccagcactttgggaggccgaggcgggaggattgctgaggtcaggagttcaagaccagcctgaccaacatagtgaaaacctgtctctactaaaaatagaaaaattagctgggcacagtggtgggtgcctgtagtcccagctactcgggaggctgaggcagaagaatcacttgaacctgggaggcggatgttgcagtgagccaagattgtgccactgcactccagcctgggcaataaagtgagactccatctaaaaaaaaattatatatattgtatctgacgcttctatagaaataactgtgggttaattttttgtatttcttatgttgtccacaaaattagaaatctctactaattttttttttttttggagacagagtctcgctcagttgcccaggctggagtgcagtggcaccatctcggctcactgcaagctccgcctcccaggttcacgccattctcctgcctcagcctcacgagtaactgggactacaggcgcccgccactacgcctggctaatttttttgtatttttagtagagacagggcttcaccatgttagccaggatggtctcgatctcgtgacctcatgatccacccgccttggcctcccaaagtgctgggattacaggtgtgagccaccgcgcccggcctagaaatctatactaatttaaagaatatcaggttgggcatgcagtggctcatgcctgtaatcccagcactttgggaggccgaggtgggcggatcacgaagtcaggagatcgagaccatcctgtgtaacatggtgaaaccgcatctctactaacaatacaaaaaaaaaaaaaaattagctgggcgtggtggcgggcgcctgtagtcccagctactcgggaggctgaggcaggagaatggcgtgaacctgggaggcggaggttgcagtgagccaggatcgcgccactgcactccagcttgggcgacagagcgagactccgtctcaaaaaaaaaaaaaaaaaaaaaaaaagaatgtcataacttctaatggagaagtatattaaaacacaattagaaacatataactagctaaaaaaataccttaacgtggatttgtcagaacatccacttcaatcaagtcagtccttacaactgtctcctcattttgtgtgatatcctgttggtgaaatgtgtttttcattttagggacacttggcattcagggacgtggccatagaattccctcaggaggagtggaaatgtctggaccctgctcagaggactttatacagggaagtgatggtggagaactacaggaacctggtctttctgggtgaggataatgtcccttcagaagtcaagatctgccctggtgtatttttgcattttgtcgtgtgcctcttagcatcttaggagtcactgtattgcttgactgagattgaaaccctgttgactcagaaatgaaaacctccataatgctttataatgctgtatttttcagaaacaataagctccataatactttctggacttaaaataattgctttcttcagaattctggcccctttgagattcatcattgagtggtaccagggcttaagtatgcgtcaaaccttatgacagacttaagatatacagttctgtgttatccacccctgtgcttattatttattagttcttgtaagagagcttgatgtctgcatgttacaatgttccctcagcattcagaaggaggcagtggatgaattcatgtgaaatactgtaatttttttttttttttttttttttgagacagagtctccctgtgttgccaggctggagtgcagtggcaggatctcagctcaatgcaacctccgcctcccgttttcaagcaattctgcctcagcctcccgagtagctgggactacaggcacgtgccaccacgcctggctaatttttgtatttttagtggagatggggtttcaccatattggtcaggctagtcttgaactcctgacctcgtgatccgcccacctcggcctcccaaagtgctgagattataggcgtgagccaccgtgcctggcgaaatactattcttgattcatttataatatcctctctcctacctagacatggggcttgcattttggagatgccacagtacacatttattctttctttttattattattatttttttgagacagagtctcgctctgtcgcccaggctggagtgcagtggcgcgatcttggctcactgcaagcttcgcctcccaggttcacgctgagtatctgggactacaggcacccgccaccacgccccgctaattttttttttttttgtattttttagtagagatggggtttcaccgtgttagccaggatagtcttgatattctttctttttttaaataggaatctgtcttcctgacctgagtgttatctccatgttggagcaaaggagagatccccggaatctgcagagtgaagtgaaaatagcaaacaatccaggtggcagggagtgcatcaaaggtgtgaacgcaggtaagagcttggatggccagagtggaggccccataattttttttttttttaaacagggtcttgctctgtcacccaggctgtcgtagagtggcaatcatcagtggcaatcgtggcttaactcatagcctcaaactcctggtctcaagtgatcctccttcctctgcttccgaaagtggtgggattacaagcatgagccactgtaccctgcaaaaccacactttgagtttctgtttgggagctctctgcaagtgagagaattctttgggaaaataaaagtttaaatcctgtgagttctgattgaagtttgttttgtcttgttttgttgagacaagttcttgctctgttgcccaggctggagtgtagtggtggtgtgatcgtagcccgtgtaccctcagtctttgggctcatatgatcatctcacctctgcctgccaagtcactgggactgtaggcatgtgccattgcatcttgctaatttttaaaaaatcttttgtggagatgaggtctcactaggttgcacaggcttgtcttgaactcctggcctcaactattcttcccacctggcctgccaacgtgcttggattgcaggcatgacccaccatgcctggcctagaagggaaatttttctttgccccctcttactgctgctgtgttctttgtttttggcgttttgtttgtttgcttgtttgtttttgagatggagtctcactgtgttacccaaactagtattggttttttttttttaatttttaatttatttttattaatttatttttttgagacagagtcttgctctgtcgcccaggctggagggcagtggcacgatcctggcttactgcaacctctgcctctcaatttcaagccattctcatgcttcaggctcccaagtagctgggattacaggcgtgcaccaccaagcctggctaattttttttttgtatttttagtggaaacggggtttcaccatgttgaccaagctggtctcgaactcctggcctcaagtgatccacccaccttggcctcccaaagtgctgggattacaaacatgagccactgctcccgggcataatgttattattataattatttcaatagggttttggggaacaagtggcatttggttacgtagataagttctttagtggtggtttctgagattttggtgcacccatcacccgagcattgtacgctacattcaatatatagtcttttatccctcacccccctcccaccttttcccccaagaccccaaagtccattgtatcgcctttgcatcctcccagtttaactcccacttatgagtgagaacatacaatgtttggttttccctcaggctttgggctcatatgatcatcttgctctgcctgccaagtcactgggactgtaggcatgtgccattgcatcttgctaatttttaaaaaatgttctgtggagatgaggtctcactaggttgcccaggcttgtcttgaactcctggcctcaactattcttcccacctggcctgcctaagtgagttagttcatttagaataatggccttcaattctatccaggttgctgcaaatgccattatttcgttccattttatggctgaatagcattccatattagtatgccacattttctttatccatttgttgattgatgggcatttgagctggttctctatttttgcatttgtgaattgtgctgctataaacgtgtgtggaagtgtctcttttgtataatgacttcttttcctctgggtagatacccaggagtggttttgctggatcaaatggtagatctacttttagtcctttaaggaatctccccgctgttctccatagtggttgtactagtttccattcccaccagcagtgtaaagtggtccctttcaccacatccacaccaacatgtagtatgttttgattttttgattatggccattcttgcaggagtaagagggtattatattatagttttaatttgcatttctctgataattagtgatgtggagtctttcttcatatgtttgttggccatttctgtattttcttttgacaattgtctattcatgtccttagcaccgcccccccccccccttttttttttttttttttgagacagcgtcttgctctgtcgcccaggctggagtgcaatggcatgatctcggccccctgcaacctccacctcccgagttcaagcaattctcctgcctcagcctcctgagtagctgggattacaggtacccactgccaagcccagctaatttttgtatttttagtagagacggggtttcattatgttggccaggatggtctcaaactattcacctcaggtgatccacccgccttgggctcccaaaatgctgggattataggggtgagagactgtgcccggcccttagcccactttttgataggattgtttgtttttttcttgctgatttgtttgagttccttgtagattctggatattagtcctttgtcagatacatagtttgcaaagattttctcccatgctgtgggttgtctgtttactctgccgattatttcttttgctgtgtcataggcaaagtctttatcatgatggacaacaccctgtcatatggcttatgagaattctttgattccatcattctgaaggacatagggagggctgtgtcaaaggggtctctttttcccatggtctctgtttctgtagtgattttatctgatgctaagtttatacatcaaacctggggtctgcatagacctgcctccttgacctgtgtatggtccacacaatttcctatatgaggaagacctcatcagaagataggaaaacattggctgctcttttttttttgcatgtggggctcaaagattgcatgaaggcgtctcaacccctctttgcctcttgaggtcttgtggagatagggaaaatccagtgttttttctactctcaaatgccactcagcagagagcgcttcacttctggtcaaccgaatgggtggggatttctacgcaccaacaaccagtttttcagtggccatctaatagttttctatgatgcctttctgatattatgtatctggaattagagtcagatcccacaggcaaagggctgagttcccaaacacgtcccctacctcagcaaccaatcacaagtagcaggttgtcacctttccttcttaccaaccagctacaggttggggttccctcaagccccttcttggggttgattactttgctagggtggcccacagaactcagtaaaacactttcttaggttcactgcctcacgctgaaggatgttttgaaggatacagatgaagagccggatgaggagattcacagggggaggcacgtgggaagattcactgggtgtgccaccctccaggcacctgtgtgtcttcagcatttggaagatctcgtgaccccatagttcagggattattttttattttttattttttttagacagagtcttgctctgtcacaggctgtagtgaagtggcacaatctcagctcactgcaatctccgcctcctggttcaagtgattcttctagttcagggattttttatggaggcttcatcacataggtgtgattgatattatctcagtctccagcccctcttcccttcctggaggatagtggatagggctgacactttcatgcttgtaatcatggcctggtctttctgatgatcagcccagtccagggaacctacagaggttgcctcattagaacaaatcacattcctatcacccagaacattccaaggagttaggagctctgtgtcaggagccaacgaagagaccaatgtatgcatttcttattttacaaggttcctcagccattcttcagttgtgctttgtccatactttagtggtgtgtgtaacgggagtaggtggctcttctgagatttttactcagcagaatgggaaagacagttgacagaaggatcctttaggccggggcggtgtctcacgcctgtaatcccagcactttgggaggctagggcaggcggatcagaaagtcaggggatcgaaaccatcctggccaacatggtgaaaccccgtctctactaagaatataaaaaaaaattagctgggtgtggtggtgcatgcctgtagtcccagctactcgggaggctgaggcaggagaatcgcttcaacccgggaggtggaggttgcagtgagccaagatcgtgccactgcactctggcctggtgacagagcgggactctgtctcaaaaaaaaaaaaaaaaaaaaagaaagatcctttattggatgcccgagtcctcgtgacagaatagctcactagaatgatacatctggttataagactaaagccactgctgattttattttgggcctttccatgtattagaaatgaacttggggccaggcacagtggctcacacttgtaatcctagcactttgggaggctgaggttagtggattgattgagcccaggagtttgagaccagcctggacaacatggcaagaacttgtctctacaaaacatataaaaatttggctgtggtggtgcacacctgtagtcctagctactcaggaggctgaggtgggagaatcacctgagcccaggaggtcaaggcagcagccagccatgatggcgtcactgaactccagccttagtacagagtgataccctgtctcagaaaaaaaaataagaagaaaataaaaaataaatgaacttatttgtatttagtcaacagttccatatggtactctttgtcttctttgttttatatgtgtggggatgttgtatcagggaatggccattgatttatatatttttgaggacctttattttattttattttttgcctaggagtttatgtaacacttatatacactccaggagttttggaatgggtagtataaatatttcttttcctttcctttacctgattaagatattaaataatatttttgtcagttacgtttattagaatgtataaattgggaatttattttcatttttctttttttttttttgatagagtctcgctctgtcacccaggctggagtgcaatgccgcgatctcggctcactgcaaccttcgcttcctggattcaagcaattcttctgcatcggcctccccaagtgctaggattacaggcgtgagcctccgcgcctggcctcatttttaatttttttagagacagggtttcactctgctgcccaggctagatggcagtggtgcagttttaggtcgctgcatccttgactttgagggcagaactgctcttcccagctcaggtgatccacccgcctcagcctcccaaagttctgggattacaggcatgagtcactgtacccggctctgatatttttaataatgcttcaatgaacatgggtttctaaatatctctttaagctgctatcttagttcttttgtatatatacccagatgaggaattgttgcctatactggtaatttgattttggattatttgagaaaatgtcatacttatttttttttttattattattttcgagacagggtttcactctgtcacccaggatagagtgtggtatacaatctcagttcactgcaacctccgtctcccaggttcaagtgattcttgtacctcagcctcccaagtagctgggattacaggcgtgtgcctccatacccatctaatttttgtacttctttaatagagacaggtttttaccatgttggccaggctggtctccaactcctggtctcaggtgatctacccgcttcagcctcccaaagtgctgggattacaggcgtgagccaccgtacctggcccatacttctttgcaccattatacatttccagcaacagaacataagtctcccatttctgcacatttttgccacttgtgatgtactgttttttttgtcttttgggttttttttttaacaataaatattccatattggatgtgagatgatagctcattgtgttttttatttgcatttttccaatgattagtggtattttgcatgtttaatatggttgctagttatttgtatatcacctctggaaaaatgtgtattccattcttttccttatttcttaatttttcatttacttttattcaataataatattaaatgaaatctttttatttgtatgagttacatatattttagatattaacatcttatcggaggtttgatttgcaaatattttgttacattaagtttccttttgactctggcaattgttttctttcattcacaatcattgtcttgtagtgcgttttatgtatttttgccttctttcttgttccgttgttttagatatattcttgctcttttgcctaggctggagtgcagtggtacagttatagctcattgtatcctgcatctcctaggttcaagtgatcctcctgcctcagcctcccaagtagctgggactacaggcatgtaccaccatgcctggctaatttttaaaaattttttgtggagacagggtcttgctgtgttgcccaggctggacttgaacccctaggatcagtgatcttcccacctcagccttgcaaagtgttggaattacaagcatgagccactgctcccaaccagaatcgtctttttctttattcttcttctggttctatccattttcaaaactggaatattgaaatcaactataatattgtggagctatttctctttggagttttatcaagttccattctatacttagtttttttaaatttacttactacttttaatagagatggggtcccagtgtgttgcccaggcttatctcaaactcttaggctctagtaatcctcctgcctcagcctcccaaagggctgtgattacaggcatgagccactgcatccagcctcattctgtacttaggagctctgacacttggtgtttatatatttataattgttgtatcttcttggtgaattgagtctttcatcattttataataatctttgtctcttatggtttttgaataaaagtctattctctcatattaacactgctacctgtactttctgctggttcctgtttgcatggaaaatatttttccatcctttccatttcagcctgtgtgtgtccttagaattaaagggagtttcttgcagatgggatttagtaaatcttgttttcttctgattgcaaagttaaatcaggccaacattacatgaaaaggagaatatcaaacatagtaactattaaaaacaaaagaatacatattagattattatctgtagattttttaaatcttgtagatttttttcccctacatgtctttcttactgccttttgtagtattttgcttgtttcatcatagtaacatacttgaatcccatctcttgtgtgtgtcggatagattttctctttgtggttagcattgcagctacttcaaatactgtgaaattgaaacattctatttttaaatattaacagtgtaactttaggtacagaaaggtctacttcacaactctgctctcactttctgctattaatggcagaaattattttgatatatgttatggtcccattaacatatatcaaaaaagcttctgagaaaaagcagggattcttaaggaaaatctatacatatatagtgctttttaaatgattttgtcttttaattactaggaaagaattatgggaggctgaggcaggtggatcacctgaggtcaggagtttgagaccagcctggctgacatggcgaaaccccgtctctactaaaaatacaaaaattagccaggtggggtaacgcatgcctataatcccagctactacttgggaggctgaggtgggagaattgtttgagcttgggagggggaggttgcagtgggccaagatcacgccactgcactctagcctgggtgacagagcaagactctgtctcaaaaaacaaacaaaaaccattaaaagtcaagttacaaaagaaaagagtaataataaatatctctatatttgattatttactgacctttaatggtgaactttctattttcattgaggttaaagatactatttagagaccttttattttatattgaaggagtccctttagcatttcttgttgggtaagtctagaatactaatgcactccctcagctcttcattttctaagaacatctaaatttcttatttttgcaggtgaatgttactaaatatagtattcttggttgatatttttgctttttttaaaaaagtattttcaacatttcctctcactgccttctagcctgcaaagtttctgttgaaaaatacacataatcttatacagtttccctttatgtgacaagtcttttttgttgctgctatcaagactgtttctttgtctttgacttttgataatttctgtatagtatgtctctgaatgtccttgggttcgttttagttagcattttagtttagttagttgaccaagcttcttgaatttgtatatttatttctttccttagattggggatgtttgaacattatttctacaatggtgatttcgaatcttctgtcttcctgtgaatctccaatagtttgtatattgttccacctgatagtatctcaaaaatgtactagggttggttttcttcatcattttttctttttgctctttggagctgattcttttgaataacatatctttcaatttgctcattgttttctgttccttttgcagtctgctgttgaatcccttagtgaaatattacttcagttatcatatttaagctccagaatttctgttcttttggttttagtagtttctcctgtgattggtattctttttcttttcatgtaatgtttgcctgattttatttagttatctgtctctgttatcttttttagctcattaagcatcttaaggcagttgctttaaatacctgtcaagtaattcagagggctgcctatttttaggcttgttttgtggagattgattgattgatcataattttagccatatttccctgtccttttgtaggcctcgtaatttttggtttaggtttggtaaagcaaccacttctcccagttattttgtgtaagcgttgtgcaggatacctttactaattagcctgctataaagggtataggaacagccactccttttctggggatgtgtttttttcctggcgtgtggaagtactattactaatgactatacagctgctctaaaagttctgattttccttaagaggctcatccctgctttttctcaaaagctttcaatttctgttgtatttttctgctcataatctctctcaaactcacccataatccacctgactcctgcaggttccccactgctccagtgcatccttccgtcccttttgttttctgcactgccagcatgatacacacagtatgctgatattccttcccatgtctgagtcaggtgaggcagaatctagtctctctgtcagacactgaacatgccattgtcatgggttgaagttccacttttttctttcttttttagagagcagctctaaattgggaagcaatgccggaaacaagtctcttaaaaatcaacttggattaacctttcagttacatctgagtgaactgcagctatttcaagctgaaaggaatatttctggatgtaaacatgtcgaaaaacctatcaacaattccttagtttcaccacttcaaaaaatttattctagtgtcaaatcccacattttaaataaatacagaaatgattttgatgattctccatttctcccacaagaacaaaaagcacaaataagggaaaaaccgtgtgaatgtaatgagcatggcaaagcctttagagtgtcttcaagacttgctaacaatcaagtaatccacactgcagataacccttacaaatgtaatgaatgtgacaaggtcttcagtaacagttcaaaccttgtacaacatcaaagaattcatactggagagaagccttacaagtgtcatgaatgtggcaagctcttcaatcgaatttcactccttgcacgacatcagagaatacatactggagagaaaccttacaaatgtcatgagtgtggcaaagtcttcactcaaaattctcaccttgcaaatcatcacagaatccacactggagagaaaccttacaaatgtaatgagtgtggcaaggtcttcaacagaaatgcacaccttgcacgacatcagaaaattcatagtggagagaaaccttacaaatgtaaggaatgtggcaaagcattttcagggggttcaggccttactgctcatcttgtaattcacactggagagaaactttacaaatgtaataaatgtggcaaggtcttcaatcgaaatgcacaccttaccagacatcaaagaatccatactggagagaaaccttatgaatgtaaagaatgtggcaaggtcttcaggcacaagttttgtctaaccaatcatcatagaatgcacacgggagagcaaccttacaaatgtaatgaatgtggcaaagcatttagagactgttcaggccttactgcccatctactaattcacactggagagaaaccttacaaatgtaaagaatgtgccaaggtcttcaggcatagattatccctaagcaatcatcagagatttcatactggagagaaaccttacagatgtgatgaatgtggcaaggacttcactcgaaattcaaaccttgcaaatcatcacagaatccatactggagagaaaccttacaaatgcagtgaatgtcacaaagtctttagtcacaattcacaccttgcacgacataggcaaattcatactggagagaagtcttacaaatgcaatgaatgtggcaaggtcttcagccacaagttatacctaaaaaaacatgagagaattcatactggggagaaaccgtacagatgtcatgaatgtggtaaggacttcactcgaaattcaaacctggcaaatcatcacagaatccatactggagagaaaccgtacagatgaaatgtgtgtggtaagatctttagtaataattcacaccttgcacagcatgagataattcattcatgagagagttcttacaaactgagtatggcaaactcttcatgctaagttctagcattaatcaacatcagagattccatactaaagagaaatcatagcaatgtatgtgaatcaggtctcttgaggcctgccaaatgactagatatcaaaacatacatcttggatgaaaccatacagatggattatgtatgctgaggctattattcaaggaccattactatggaacatgataagatttacacaagcgataattcagtctctagttctccaatatttatgatactgcatgctgcagaaaagtcacagctccaaatacgttgaatctcatgacgcgatgcatgtcgaaggtccaagggcatgtggaaatggtcagttatattcaggcaattaaaaaacctaattatatggggttttttgaaaaggctactttacattttatgactttcatcctcaactctgaaatcacttcatgtgacttctttacagacctttcactgtggtctcttgaatcagtaggatgctgggcgcggtggctcccgcctgtaatctcagtacttttgggaggctgaggcgggcggatcacgaggttaggagatcaagaccatcctggctaacatggtgaaaccccatctctactaaaaatacaaaaaattagccaggcatggtggcagacgcctgtagtcccagctactcgggaggctgaggcaggacaatggtgtgaacctgggaggtggagcttgcagtgagctatcacgccactgcactccagcctgggggacagagtgagactctgtctcaaaaaaaaaaaaaaaaagaaagaaaaagaagcagtatgatgacagggatgacttcattagctgagaatcatttctatcagtttgccgaggaagaaggacactgcgttttcttattattgtctgatttagagagcatggaggtggggaggaatcatataaaatgatgatggcagtcatcatactgttgctgagcacttttttcctgacagaatggcacagtgcttctgtgctctaccaactagccatgaaatagagcatatctgtagaaatcatgcaagggagatggtgggcactaggactgcatagcaatcactgtttaggcaagaatgattaaaaagtagtcatttttggctgggcgcggtggctcacacctgtaatcccagcactttgggaggcaaggtgggtggatcacttgaggtcaggagtttgagaccagcctggtcaatatctccaaaccccatctctactaaaaatacaaaaattagctgagcgtggtggtagatgcttgtaatcccagctactcgggaggctgaggcaggagaatcgcttgaacccgggaggcagaggttgcagtgagccaagatcgcaccattgcactccagcctgggtgacaagagcaaaactctgtctcaaaaaaaaaaaaaaaaaaaatagtggtcatttttgaaatggaagagagaacagttgattagagaatttaaactaccagtatgccatgttcttgagtagcatttacatttaactgttggcataatttccaactgtttgatttagaatgtacatagttctcatgttttaattaataaaattttcctaagtatgaatgaatcacatcatttctaccaattgttttagtcccccttaggagaatatactgcacagtaatgcaacattaatagtaaatactctgcaatttggttttctttgtcttcacactgagttatgtagcagtgatatgtgtctaatcactctaactttagtgtaaaataggcatttttaaaaaatgcaccattaaggttgacgcatccagaacaattttgtgtgtgtgaaatcaacatatgcacacacttgtggtgcatatccttgggtaagtataatttacactaatcatacttaatacttgagttattctttctgtgccacttcagcctcctacaccctcaaaagtccatgaaacattcactgttcattatatttctacgtgcctattgtgtgccaaggaagactcatggcatgcaccttaatttttatgaagcaaaaatacaaatatatgacaaatacttttttttttttttgagacagtgtcttgctctgtcacccaggctggagtgcagtggcacaatctcggctcactgcaacctctgcctcccgggttcaagcaattctcctgcttcagcttccctaatagctgggactacaggcgcacgctgccacgcccagctaattttttgtattttattagagacggggtttcaccatgttgcccaggctgttctcgaactcctgaactcaggcaatctgcctgcctcggcctcccaaagtgctaggattacaggcgtgagccactgtgcctggcgacaaatactattaaatgaaagaaagtatgttaataagagtgaaaatactgtaccacaatgtcttttttttcctagtagtgcatgtcttttttttttttcctagtagtgctcagtgacgtaagtggaaaatattaatgttcataaattttctttttttttttttttttgagacagagtctggagtgcagtggcacgatctcggctcactgcaacctccacctcccaggttgaagcaattcttctgcttcagcctcccaaataactgtgactacaggcgcgcaccaccacgcccggctaatttttgtatttttagtagagacaaggtttcaccatattggctaggctggtctcaaactcctgaccttgtgatccacccgcctcggactcccaaagtgcggggattacaggtgtgagccactgcgcctggcccataaattttaagaatggtcacatagaatgggagttttttttgcttttgtagattaactagaaacttcatatacttccccttacaacatttttggcaatttgaacttttttttttttttttttttttttaggcagagtctctgtcaccaggctggagtgcagtggcgcgatcttggctcatggcaacctctgcctcccgggttcaaacggctgcctcagcctcatgagtacctgggactacaagcgtgcaccaccacgcccagctaatttttgtatttttaatagagacagggtttcaccatgttggccgggatggtcttgatctcttgacctcgtgatccacccgcctcagcctcccaaagtactgagattacaggtgtgagccaccatgcttgaccgataatttgaacttttgactgctgtactggaatttgtttgaagtccacctaaagtttgtattatatattgagaatgatgatgccatacactgatatggtctgcaaatgtttactacataaacatttacatgaggctttctggggaaagcaggatggacttccccagctggtccaaattggagaacagggataggtgagcagcctgggatgttgtattagtctgttctcatgctgctaatacagacatacacaagactaggtaatttataaagaaaaagaagtttaatggactcacagtttcacacggctagagagacctcacaatcatggcagaaggtgaaggaggagcaaacacatgtcttacgtggtggcgggcaagagagagcccgtgcagggaaactgccctttataaaaccataagatctcatgagatttattcactatcatgagaacagcatgggaaaatcccacccccatgattcagttacctccccccgggtccctcccacatgtggggatcatgggagctgcaattcaagatgagatttggtggggacacagccaaaccatatcattttgcccctggtccctcccaaatctcatgtcctcacatttcaaaaccaatcatgcctccccaacagtcccccaaagtcttatttcagcattaactcaaaagtccacagtccaaagtttcatctgagacaagcaagtctcttctgtttatgagcctgtaaaataaaaagcaagttagttatttcctaggtacaatggaggcacaggtattggataaataacgcccgttgcaaatgggagaaattggccaaaacaggtcacaggccccatgccagtctgaaatccagcagggcagtcaaagctccaaaatgatctcttttgactccgtgtctcacatccaggtcacacttatgcaagaggttggttccagtggtcttgcagggaacccatgtctgcccctgtgactttgcagggtacagctcctctcctggctgctttcacaggctggtgttgtgtctgctacttttccaggcacatggtgcaagctgtcggtgaatctaccattctggggtctataggagggtggcccttttctcacggctgcactaggcgagtagtgagtagtctgtgtgggggctccaaccccacattttacttctgcactgctctagcagaggttctccatgagggctccgcccctgcagctcacctctgctccagttccaataaagttcctcatctccatctgagaccaccttcagcctggactttttggtcagaaccattcaacaaccattttctaggaagctccaaactttcccacgtcttcctgtcttcttttgagccctccaaactgttccagcctttgcctgttacccagttcaaaatttgcttccacattttgaggtatccttatagcagcaccccactctataccattaccaatttactgtattagtctgttctcacgctgctaataaagaaatacccgagactgggtaatttatgaagacaaagaggtttaatggacacagttccatggggtcgtgtcccccgtgcttctgccacagggccatatagacagctcttatcgcggagttttcctgcctcaaatccttcagtgtcccctgcactggcccgcaccttttttaaagtcctcaccgcaaggttgattcccgccctgggagcttcccatctgctccgctccctcgtcagctcctggagcgcagcgacgcagccccagtcccagggaggccgtgaactcttcctggtcctgggatcctgcagaccctgcccctctcctgactttctcctgcctttttcctccttgatcgggggcccttctgctccccaggcctccccttctcctgatatcgagtgtggggacgtgacttctatctcaggacgttaaggtttctcttgtcccaaattccatcccacaggaaatgggctcttgaggtggggatctgactgcagtcccctccctatgaatgtgtggaggagaggaaatagaaaaatggtgaaatgggaaagaagaatgaaggagacccataaacagacggcagctgggtgcgatggctcacgcctgtaattccagcactttgggaggctgaggcgggcagatcacctgaggtcaggagttttgagaccagcctgaccaacatggagaaaccctgtctctaaaaaatacaaaattagccaggcatggtggcgaatgcctgtaatcccagctactctggagactgaggcaggagaatcgcttttacccgggaggcggaggttgcggtgagccaagatcgcaccattgcactccagcctgggcgacgagcaaaactccatctcaaaaaacaaaaaacaaaacaaaacagatggcaaagtagatggtggatgagggatttgcagagacagtgcatgaagatgctgagaaaggagcagggggagaaaagcaactagagaaatttagagaaaaactgggtttctagagagataaagttcagcaagatagggagaggggcagaaaaggggaggctcctcagatggagagttggggagagaaggagggatttggagccagggcagacagagcagcatggtgctgggagagcaagaggggcagccagtgataaggagagcacagggagaaccacagcctggggagaactgggatctggggatgccagagaggggacaggtggatatagcagggaagaggggatttaacaggggaagctagggggcagcagagacggggggaagaaagaggcagaactatatgaaaattggagacaaatattgggcagaaagaagaataagaggtgaaagaagtgagaaaggagcagaacaagtggaagagaaggaatagagggaagagcaggagaaggaagaagggcttgaaatgaggagaatcctaggggaaaaataaagagaaaaaaaaagctaggaaaagaaggtgagaatgagaggtaggtagagaaacacacagtaatgaggaaagagggggacactcaatccagatgaatgatgaattgattggatattatgattaatttctctataataaacatcacatttgtttaaaatatacagatgaagatgagaattggaaaactgtctataaggcatgtgcatttcctaattcttggtatcagaggttagcttccatttgctgtccttattctgccagacggcaggcagtgacttgactcattcaggtatgggtcactatcttcacttctgggatggggtagggtgtgtgagtgtataagataggaggaaaaaccaaagtgttttttctactcacaatcaacacaatagtgaatgctcaacacagaatgcctcatctccggtcatcaaaatgtgtggggattacttcccaccaacaagctatttttcatcagataaaaactgggtgttctctaattgaactcaatttgacaccatttatagggagttagcattagatctcacaggaggctgagggctcagttgcacaaaactgcccccagaatttgctattgctagagtgatttacacaacttggagaaacaatttactgaggtgtaccatttgttataaaggatgttacacaggacacagatcaacagccagatggaagagcattcctaataaattaatggaaacagaagtatgttttggaaaccatggactgactttctttctctttctctctttccttcctccctttctctctctctttcttttctttcactttgacggagcctcgctctgtcacccaggctagagtgcagtggtgctatctcagctcattgcaaccgccacctcccgggttcaagtgattctcctgcctcagactcccagggagctgggattacaggcgtccaccaccaaacctggctaatttttatatttttagtagagacagcatattgccacgttggccaggctggtctcgaactcctgacctcaagtgatctgcctgcctcggcatcccaaagtgctgggattacaggcctgggccactgcacccagcccagggcttgagttttaaaggtgccacagtacaccttggttctctttttttataaacaggaatctgtcttcctgacctgagtattatctctatgtgggagcaaaggagagagccctggactctggagagtgaagggaaaatagcaaaaaaatccagatgggagggaatggatcaaaggtgtgaacacaggtaagagctcagatgggcagagtggaagctgtatatatatatatattttttgagagacagggtcttgctctgttagccaggttggagtgcagtggcaatcatagctcactgcagcctggaactcctgggctcaagtcatcctccttcctctgcctcccaaactggtgggattacaggtgtgagccactgcaccctgcaaagccacactaataaatagtgtttgggaaactctgcaactgggagaattctgtggaaaaccaatagtataaatcctgttagttttttttttttttttcttttctgagacagagtctcactctgttgcccaggctggagtacagtggcgcaatctcggctcactgcaacctctgcctcccaggtttaagctagtctcctgcctcagcctcctgagtagctgggattactggtgcctgccaccatccttggctaatttctgtatttttagtagagagagggtttcaccaagttggccaggctggtctcgaactgctgtcctcatttgatctgcccgcctcagcctcccaaagggctgggattacaggtgtgagccaccatgcctggcctaaatcctgttagttttgaatggaaattttctttctttcttttttttttttctgggacagattcttgcttcgagacaatgacaaatacaaactaggtttactgtaaatatgagaaagggaaaaaatacttttattgtattagaagacttgaaatcacatgaagtgataccaatcttttgttgttgttggtcagatgttttagctattttaggtgtttgggttttttgtctttctacataactgctaaccttgttagtatctgcagaatgccttaattaggaaaggtattaaccctatgtgtcagatttgtataattcatattgctttacatggagtcttccaataaatgtatatggtatatgtctctatttgctgtctttgatttcttttatcagcatttggtagttgtaacataacagttctatgaatgttttgtttcacatgtatttctttgccccccccctttttttttttttttttttgagacggagtcttgctctgtcgcccaggctggagtgcagtggcgcgatctcagctcactgcaagctccgcctcctgagttcacgccattctcctgcctcggcctccccagtagctgggactacaggcacccgccaccacacctggctaatttttttgtattttcttagtagagatggggtttcaccgtgttagccaggatagtctcgatctcctgacctcgtagtccacctgccttggcctcccaaagtgctgggattacaggtgtaagccactgcacccggcctctttgacctttttcttaatggagcaatcatacatagtattttatttttaatatcaggtttcatgtgcaaattgctagtgtatagaaatatacaagattattattattattattttgagacagggccttactctgtcatcctggctggagtgcagtggagcaatctcagctactgcaacctgtgtcctgcaggcttaagtcatcctcccacctcagcttccccagtagctggcactgcaggcatgtgccaccatggcctgttaaatttttgtgttttgtagagatggggtttcaccatgttacccagcctggtctcaaactcctgagcttgagtgatctgcctgccttggcctcccaaagtgctgggattacaggcacgagccaccatgcctggctgatgaaatatacgatatttttgtaggttgaccttatactttgctacctttacatttttcttgttctagagatttttgtagatttttttggaattttctacataaaatcatttcatcagtttcctattgctatacacagtgattggcttaaaacaagaaaaatttattcttttataattctgtaagtcacatatctaatatgggtccatagttctgtgattcttcattaatctccaggggagaatttgtttccttaccctttgtaggttccagaggccacttacatcctttgactcatggtccacttcctccatctttaaaggtgagaaaaaaaatctctttatccctctattttcaacacatcaccactgtctctgtcccttcgcatccacctgcacccttctgatattgaaccttgtgattctatcactttgaccatataattcaggatgtctatctaaagatccttatctagaccacatttgcaaactcccttttgatatatccagtaacacaggtcatagggatgtagctaccttcctttgggaaaggtattagcctgcacaaccaacatattttctgttggtacactattttttttgtcctgtcctcaggccaccctccttcctcagcctcccaaagcactgtgattacaggcctcagacaccacacccagcctgtcacttttatttctttttcctttatttcactggctggaacctttcatattgtgtggaatagtagtgataagaggggacattcttgccctcatcccaacctctaggggaaactatgctttcaccagtttgtatgatgattctgattctgtaaggattggtaggtgatcttgagttgaggaagtttcccatgatactgctttccatactgaccgcagtatttcagattcccacaaaatgtacgaaaatagtttctccacatccttgcttgtgaagcaggttcactgcacactggttgccaatgtgtctgagttgagtgagagataatctcacggacacacagtaagttacatgaagtgaatttgttacatacagatcggcagatacctgggattcatgcattctgctccccaaggctcaggaaaaccacccagtgcagatgcagtctctctgtatgtgttcaacttgcatcacagctgtgggaggctggaaggcggcccatcctgggtttcatgctccagggatgcatggcacgttggcctaaagcaacaaaggggatcctgttctggggatctggaacacatcctgtccttttctcaccggtcccttcctctcaggatgttgcttttccagcacattctatattcattcttgggaactacaagtgagaagtcagatgcaactgggccaattcaaccccacttgaatgctgtcctgcagtctctccgccaatccagatatcccttttatttttatattttttgagacggagtctcgctctgtctcccaggctggagtgcagtggcgcaatcttggcttactgcacctccacctcccagattcaagcaattcttgtgtctcagcctctcgagtagctgggactacaggcgtgtgccaccatgcctggctaattttttttttttttttttttgtatttttagtagagacttcgtttcaccatgttaaccaggctggtctctaattcccgacctcaggtgatctgccctcctcggcctcccaaagtattgggattacaggcgtgagccaccacgcctggcccagatatcccctttaataaagctagtccatttacatgtgcactgacctccctggatctggaggtagaggctggtctcaggagattgaagtaatacctcgactggcagaatctcagggcaacatcattgaggtacagccagttgcatttcactaggctcaagaggattgctgcctcaagcaggataaccaggcctgcctggagcagtgccgtagtccaggatcccagtgacctaggtgagaagttggtactcagatcaaagaaaagttcttcaggtgaccccactgtctgcagccaatgggcctgcttgtgggccttatgtatttgtgtttcaaaaataacctgagggcttgatgtgggggtccttatctcccatgcaaggtgattcatgcctataatccgagcactttggtaggagcagatgggaagactgcttgaggctagaagctggagaccagcctgggcaacaaaaccagactacatctctattaaaaacaaagcaacaaacagtagaaaattagcacagtggagaggcacaggcctttactcacagctactcggcaggctgagacagggggtcacctgcccaggaccccaggaagtcaaggttgcagtgagctatgattgcgccactgcatttcagcctcggtggcagagaccctgtcttaaaattttaaaaagtattaaaaaactaagttggaccgggcgtggtggctactctggaggctggggcaagagaatcacttgaacccaggaggcggaggttacagtgagctgagtgcctgccactgtactcccgcctgggggacagagggagacgctgtctcaaaacaacaacaacaacaaaaaactacgtcgtttatggctatttttataagttactggctttttttttttaaagaatcggtgacttatcttcacactggccttagtcctccatgcccaacacgatgtccctaggaaagtctctggaattgagcacagggttgaccttcaccgtctagagtgaatggggaagataaatgaaaagtatttatcttctatgggcactggcatgaaatagaacattctaccctggcagggttttgcatttcacattttagcttgcatcatccccttcacagacaattccaaagtgtgttaattcaattcctaaagcttcccttcccttcctcccttcccttccctccttacttttctttcttgtccatttattttcggtttttttctctttctttcttggttttctttctctttttcaacttctctttcttttctctttctctttactctctctcttctctctctttctgcttccagggtaggtgggacttgaaattcattttaatagaaggaattttcgtggatataatctacaaccgattttgctctgcgcaggtaagatccgttttcagaccaaaaccctgaaaacaagcgcagccagtcaagcgaacggaagcgcaggcccggcccaggctttgtcccggcccgccctggtcccagccagtccggcctctaggatgcgcgcgcaatttcgtgcaaacccggaagcggaccgcggggggcgaacgcctagagcgcagtttccggtagacccggaagccgattgcagggagaaactgttttcgcagcagtgcgtgagtttccctttgtctatgttaagtctaggctagccagttcttctctgcttctatacccgggagctgaggggcatgcagaccttgaaatcccggcaccgctccctccaccccgagtaaattcagacatcctttgagagtctgggagtcgctttctgcgtgttaaaatcgcttggaggctggtcgtgtgcccggtctttttgtcatttacccacgtagacacctcctatcgtggggtttacctgcttcaaatcctttagtaacccctacacacgccccgcaccacgtaaaatcctcactctccgttcccctagcctcgcccttctttgcccctagagctcagcgccccaacagggcacgagaggcctcgtcctctgcccagacctggtttctgcagactccacccctctcctgacccactcctgcctttttgctccttaatctggaccctctgttccccaggcctcccttttccagccaccggttctcctgaccccgagtgtggggggtgacttcagtctcctgacatccagtgttctctcgagccagtttccagcccacagaaaatgagctcttccggaagtgggcatcttattccaatcccctccctgtgaatgtgtggagaaaaagagatgggaacgaggcagaggaaatagagaaattttgaaagagaaatgaagaatgagagacccattaacagaaggcaaagtagaaggtgagtgaggggtttgcagaggcacagtgaaagaaggtgccgagaaaatagcaggggagaaaagtaactgtaaaaatatagacaaacctgggtctgtagaaagacgaaattcaacaagatagggaaggcttctcagacagaggggggagaggaggagggatttggagccaggtcagacagagcagcgtggtgctgggacagccagagggggcagctggtcacaaggagaacagggagaaccacagcagggggaggcctgggatctaagggtgccagagagtggggacaggggtgtgtaatatcgaagatggaatttaacagggagaccccaaggggagctgagatgtgggaggaaagaggcagaaatatatggagattagggacaatgaaagattgggcagaaagaggaataagaggtgaaacaagttgtaaaaatggatcagaacaggtgggagagaaggaatagagggaagaatgggacaaagagaagaggagggactcaaaatgaacagaatcctaggggaaaatagagaaaaaaagagctaggaaaaaagatgagaatgagagatatgtacagaatgaggcagggaaacagtagtgaggaaagagggggaccctggttacagatgagtggtgagttgattggaaattatgattgaattgtgacatattaatttttctataatataaaatttgtttagaacacatgaggctaggagctgtggctcacacgtgtaatcccagtactttgggaagctgaggtgagcggatcacttgaggtcaggagttgagaccagcctggccaacatgtgaaacccatctctagtaaaaatacaaaaattagctgggcctgatggcctgcgcctgtaatcccagctactctggaggctgaggcaggagaatcgcttaatcctgggaggcagaggttgcagtgagccgagatcgtgtcactgcactccaggttaggtgacagagcaagactccatctcaaaaaacaaaaaacaaaaaaccacacatgaagatgagaattggaacactatttataaggcactcttctcttttcttgggatggactagggtgtgagtgtataagttaggaaaaaccagtgtgtttttgtgttcacagtgaacacaataaagagcgctcaacacagaatgcctcatctctggtcaccaaagtaatatgggaattacttgtcaccaacaagcagttcttcgtcagacagcacctgggtgttctgtaattttactcagtttaactggtcagtgtaggaacaaccacagacacattttgatcactaaaggtgagggattctcctttgggtgtgagagtagtaaaaacagtgtggttttttcctgtctcaaacagtaaggggaagaattttccaacaggcccactcacctgtctctaggactgtgttcttagtagtgactgggaattgtctgtccctgctcctggctgctgctgatgctgagactgtgtgccacaggccagccccattcactctctcctgatgccacggcatccctcctccacagtgtcatcagattttacttcaagggaattattttggtcagcatacccagatggagttgttgcccattaaaacacacacacacacacacacacacacacacacacacacgcctttattttttccactatttcatcctcagaagaaaaaacaaagtattagctacatttttacttgcaataagtatgccttttctgtgctccatgtaagagcacaatataccaaaatcttgtttaggcgctctctcactctttcctccatttcttgcttgaccccatccaatcaggttttgacaccaaccattccactgctcctttttttatctgagtcaccagtgacttctctgtttctaaatctagttatttatttattcatttaatttttagagacaaggtcttgctctgtcacccaagctggcatgcagtggcacagtcatagttcaccataacctcaaacccctagactccagcaatcctcccgtcttagcctccagagtagataggactatgggcctgtccctctgcgtggctgattgaaaaaaaaatttttttttttgagacaaagtctcactacattgcccaggctggtcttgaactcctgacttctagccatcctcctacaaagaagtcccagcatgctgggattagaggcatgagccctttaccctgcttaaatctgactttgaattttctgtcctcctgtctttttctgtcagcagcatgtttcacagctgatcactcttttttttcgcagctttgaagacattgcttgtatttttaaaaatctgtttaaaatttttctcattactttcgtatcttatcagtttcctctgctgctgtctcctgaagtgtcttctctgaatatggaaatgtcacccaatttagtccttaaacctgttctgtctgcccacaccctcagcttttccttttgatctcatctatggttttaaacaccaccaacatgtctccattttccctcttcacccacccctctcccctgaattccaaaatcctgtgtccagtcatgttctcgacatctctgctgggacatccacaggcatctccacctccacgtgtccaaaataggcttcctgaactcccccagacatgttctccctacagtcctgcatagctcagatgacagacaccttctactttctggggattaactaaacctgtcagaatgtgcttaaaatatatgagatactatttgtgttttaatttctaaggtacagaataagtgacatatttacttaaaatgagtgaggaaatagattgtttcaaaatttcttttgatgtgtaggagaaaatatttgaagagctcagccctgcctgatctgcttccccaggacctctctgacctcatctcctgcctctgttcttcccgctccctctactgcaactacacagccccctttccttttctgagagcgttttgtatttttaaaataagtgcttgatcaaagtatgattttaggaatcacagtttattaccacatgaagaattgcttttttttttttttttttttaggttcacaaattttaagaaagggagaataaagtgaaaaaaatctcagaaggaatccactcaacagacgaggtaccttaaccacataatggttgatttccaaaattattaacatctgcttgctcagttaggataaatcagacctatgtagaaagtcaaagtttgaggattacctcagggtgaggtcttccctttgtgtgtggctatggcacaggaaggaggtatgttgattctaagccctaagcagcatatttttgacattcaggattcacttccaaagagacatattatgcaaggaagcaacttggaagaggaaagaaaagaagtcaggaatggcccttactcaggtaaggtaatgttctcagtggattgttctgtctctgtttcttcctgaaatgccaggcattggagttgctaatctttgactctgaagcatcctgcctgacacgtttgcttgcacttacccatggcttcttccagtcccttcatttccgcttgagatttcagttcactgtgacccattgacatgaacttgggaagaggctgcactgggcatggtccgggggagggctctcagcagacatggatggagacggggtgtgggtcccgtggtggcagtgctgctgggcagcagggattgttcagggatcacatctggatgcactgtcagtgttctgtggactagaattagagaagctgcacgtcaaagttcctttctttcttctttcttttttttttttgagacagagtctcacacgttgcccaggctggagtgcagtggcatgatccctgctcattgcaacctccgcctccctgattcaaaggatttttccacctcagcttctcatgtagctgagattacaggtatgcaccaccactctaatctaatttttgtgtttctagtagagatggggtttcgccatgttggccaggttgatcttgaatgtcagcctcaagtgatctggccacctcggcctcccaaagtgctgggattacaggcgtgagccaccacccccagccatatccaatgatttcttaaggtatagggtgctgaggtattttctttgcccttaatatgttaaattagtacattaatttcctgtaacatatcacctttttattaatggaataaattagtaaacttaattaaattttgttaatacctaaataacaatattttaatggacgaagcttcatttataggccagaagcagtgatgtgtgcctataattctagcttcttgaggggttgaggtgggaggatccattcagcccaggagtttgagactatcctggacacctagtgagatcctgtctaaaattttaaaaatattatgtttttgaatatggatatttagtagagattggagttcaggtttctgtggttttacatggtctcccatttttaagtacttaccatatgtttataaaataagttggtacaatttatacatttttattgtggcaaatatgctgaaatacacattgggaaaaatagtacttacaggtaggcacaatggtgcatgcctttagtttcccacttgggaggctaatgaggaaggatcctttgatgccaggagttcaaggttatggtgtgctgtgaatagccactgccatccagtttggacaatgtattgagaccctgtgtctaaaaattgcgaaccaaactaatgatgaaaaatatgtaaaaaataggtcactgggacagggtgcagtggctcacccctgtaatcccagcactttgggccaaggcgggcagatgagagggtcaggagtttgaaaccagcatgaccaacatagtgaaacccatctctactaaaagtagaaaaattagccaggcatggtggcgcacatctgtagacccagctacttgggcggctgaggtaggagaatcgcttcagcctcagaggtggagattgtggtgagccaagattgtgctactgcactccagcctgggcaacagagcgagactccatctcaaaaaaaaaaaaaaaaaaaaaagtcagtgagagacaacttctcttatttcaactgatgtctataagtgtgtatgtgtactagtgtatatgagtgtgtaagtgtgtacatgtgatgtgtgtggatgagtgcacaacagtggtttttatgaatggcatgtcatctatataaattttatgttttttagtcagttgaaattacatcttaaatatttaccaggttaaaatttttctatactatcatgctaatgagctgatagctataagaataataatgtattatggggacatataatatattatatatatgcagatataatgaccttttaggcagttttgtgtttttaatccttgaacttgttttaagtttactgaattaggtaattgtcaattttcttttgatcctgatctgttacttaactgtttgattctttaggtttgattctaatgtccagacacctgggatcccatgcttacactgccattgttagtcctgacacctggggcgagtttcctagaatacatgtgaaagagttgtctcttcagtaagataggaacagattattctttcttcttttgtttgtttttttaggtgaagtctcgctctctcacccattctggagtgcagtggcgagatcttggctcgctgcaacctccgcctcccgggttcctgcgattctcctgcctcagcctcccaagtagctgggattacaagcgcctgccaccacacccagctaatttctgtatttttactagtgatggggtttcaccatgttggccaggatgctctcagtctcttgaccttgtgatcgcctgccttgtgatcctccagttagttcatgtaaagcatttaaaatagtgcctatcacatgggaagtgttccattcagccattgctattgttatcatcacagttttcagattttgatcattttttattttatttgtttttttgagtcggagtgtcactcttgtctgttgcccaggctggagtgcagtggcatgatctcagctcactgtagactccacctcccgggttcaagagattctcctgtctcagccttcttagtagctgggattacaggcactcaccaccacacctggctaatttttttctatttttagtagagacagggttttaccatgttggccaggctggtctcgaactccttacctcaggtgatccacctgccttggcctcccaaattgctaggattacaagcatgagccaccacacctggccaagattttgaccattcttaaaaactacaataggttggggccgggcacagtggcttacgcctgtaatcccagcactttaggaggccaaggcaggtggatcaggaggtcaagagatcgagaccatcctggccaacatggtgaaaccccgtctctactaaaaatacaaaaaattagctggtcgtggtggcaggcacctgtaatcccagctagttgggaagctgaggctggagaatcacttgaacctgggaggtggaggttgcagtgagccaatatcacaccattgcactccagcctgggcaaaaagagcgaaacaccatctcaaaaaaaaaaaaaaaacccaaaactacagtaggttgggtgtggcggctcacacctgtaatcccaggactttgggaggccaaggtgggaggatagcttgagtttaggagctcaagaccagcctgagcaacatggtgagacaccatatttataaaaaatacaaaaattagccaggcatggtgtcatgagcctgtagccccagctactccagaggctgaggttggaggatgacttgagtttaggaggcagaggttgcagtgagtcaagattgtggcactgcactccagtctgggtgacagagtgataccctgtctcaaaaaaaagaaaaaaacactgtagacattgtcatctctgaagacaccacttgaattgaatctcaggtagatactggatatcacttggtgtgtaaaaatacctaacacttctatagagagagataaccctggattaattttttttgtattgtccaaaaatgagacatctacactgatttaaggaatgtcttaacttcttatggagaaatataataaaaccacaattacagacacgtaactggctcaagaataccttaatatggatttttcacagtgctcacataagtggagtcagtccttaacgactgtcttcccattctttgtgacgatgagtactgtgtgcataccttgttgctgaaatgtggattttctttcagggacccttgaaattcatggatgtggccatagagttctctcaggaagagtggaaatgcctggaccctgcgcagaggactttatacagggacgtgatgttggagaattataggaacctggtctccctgggtgaggataatgtcccctcagaagccgggatctgccctggtggatctctgaattgtgtcttatatgcctcttgggagctcctgcattgcttgcctgagattgaaaccatgttgactcagaattgaaaaactgtattacactttctggacttgaaatgtcccctttcttcagttattctcctccctccacaattcatgattggtggcaccagggccgaagtatgcaggaaaccttatgacaaactttaaaaatatccagttccctgttttctacccctgtgcttttgattctatagttcttggaagggggctctatgtctgcatgttacaatgttccctaagcattcagaaagaggcagtcagtagatgaatttgtgaaatactatttatgatttaattataatatcctctctcctccctaaatacagggcttggacttgggagatgccacagcacacatttattctttcttttataaataggaatctgtcttcctgacctgagtgttacctccatgttagagcaaaagagagatccctggactctgcagagtgaagagaaaatagcaaacgatccagacggcagggagtgcatcaaaggtgtgaacacaggtgagagctcgggtgggcagagtggaggccccataatttttgttttttgagacagggtctaacgctgtcatccaggctagagtgcggtggcaatcatagctcactgcagccttgaattcctggacttaagggatctccctggctcgctcttccaaagtgttgggattacagccatgagccactgtaccctgcaaagccacactattacatagcgtttgggaaactctctgcaaatgggagaattctgtgggaaaaccaaagttgaaatcttgtgagttctgaacagacatttttctttattttcctatttattttttggagataggatctctcttgggtcacccagtccagaatgcaatggcatgattatggcttgctgcatcctcgacttcctgggctcaagtggtcctcccacctcagcctcctgaatagccgggactacaggtgtacgccacgatgcctggctaatttttggtattttatgtggagatggggtttcaccatgttacacaggctagtgttgaactcctgggcacccagtccagaatgcagtggcatgattacggcttgctgcatcctcgacttcctgggctcaagtgattctcccacctcagcctcctgaatagctgggactgcaggtgtacgccaccatgcctggctaattttttgtattttttgtggagttggggtttcaccatgttatacaggctagtgttgaactcctgggctcaagtagtctgcctgcctcagcttcccaaagtgttgggattataggcataagccacagcaaccagtaaggtgtgttgtttaattggcaaatatttgtggatctttaagtttttattcttttggctgggcacggtggctcatccctgtaatcccagcactttgtggggctgaggcaggcagatcacttgaggccaggagtccgagaccagcctggccaacatggtgaaaccctgcctctactaaaaatacaaaaatcaactgggtgtagtggcaggtgcctataatcccagctactcaggaggctgaggcaggagaatcgcttgaacctaggaggtggaggttgcagtgagccgagattgcaccactgcgccctagcttgggtgacagagtgagaccctgtctcaaaaaaaataaaaatgcatttttttcttttgttaatttcaacgttacatgcctctgcctctggagtagctgggattacagacatgcaccaccacgcctggctaatttttgtatttttagtagagatgggatttttccatgttgggcaggctggtctcgaactcctggcctcatgtgattagcccttccttagcctgccaaagtgcttgggattacaggtgtgagccacttcacctggcccaaaacattctattttaaatgttaacagcttatctttgattaggtacacaaagctctgcttaacaactctgctctttctgttattactggcagaaattaatcctatatattttatgttcccattaacatatgtttataatgtttataatgctttttaaatgagagtgtctttttttttttttctgagatggagtctccttctatctcccaggctgatctcggctcactacagcctctgcctctctggtccaagtgattctcctgcctcagcctcctgagtagctgggattacaggcgcccatccccacccctggctaatttttgtatttttagtagaaacaggtttttgccatatttgccaggctgctctccaactcctgacctcaagtgatccacctgcctcggcctcccaaagtgctgggattacaggtgtgccactgtacctggcctgattgtgtcttttaaattgtaggaaagaattaaaagtcaagttacaaatgaaaagtgcaataatacttgtttctgtatttgatcatttgttgaccttttatgatgagctttttatttttatttttgggggatggagttttgctctgttgcccaggctggagtgcaatggcaggatcttggcttactgcaacctctgcctcctgggttcaagcgattctcctgcctcagcctcccgagtagctggggttacagacaccacgcccaactagtttttgtatttttaggagaaacggggtttcaccatgttggctaggctggtcccgaactcctgacctcaggtgatccacccacctcagcctcccaagttgttgggattacaggcatgagccactgcgccctgcctatgatgacctttatattttcatatggattaaagataccgtccagagtgctttcatttcatcttgaatgctcgttttagcatttcttcttggacaggtctagaatactaattaacttcctcagctcttctttaggaaagtctaaaattcgcctttatttttgcaggtgagttttgctaagtgtagtattcttcattgctgttttgcctatttttctttaagcactttcaatatatcacctcactgctttctagcctgaagatgtctgctggaaaatatatataatcttacagagtttagtattgtctgacaagtctcttttttgttgctgctgtcaagattttgtctttgtctttttttgactcttgataatttctttatagtatgtctctgtgtgaatgtatttgggttaattttaattagaatgatcaaatctcttttttttttttttgagacggagtttcactcttgttgcccaggctggagtgcagtgccatgcatgatattggctcactgcagcctccacctcccgggtttaagcgattctcctgcatcagcctcccaggtagctgagattacaggcaccctccatgatactccttttcatgcatcattttcctgatttcatttaattgtctatctcatttatgtttcagctggttaagcatcttaagacagttgctttcaaaatttgtaaagtaatcagagggctgcctttttctaggttgggtttgtggagatttgggtttttttgtttgtttgtttatttcaatgtccttatgtaggccttgtaatttttattttaggtttgctaaaacaacttctcccaggtttttttgcttgtttgtttttgtttttgttttttttgagatggagtctttctctgttacccaggggctggagtgcagtggcatgatcttgtctcacttcaacctccacatccaagattcaagcaattctcttgtcttagcctcctgagtagctgggactaggcgcacaccatcacgcctggctaatttttgtatttttagtagagacagggtttcaccatgttggtcaggctggtctcgaactcctgacctcaggtgatccgctcaccttggcctcccaaaatgctgggattataggcatgagccaccatgcccagccaggtctctaactattgacctcaagttatccatccccccttggtttcccaaagtgctgggattacaggcatgagccactgcactggctgttccagttcttttacataagaactgtacaaggtgagacctttacaaatcaacctgttgtaaagggtgtgggtgccacctgcatggaccttgggggactaaacaaagggaacaaatgtgggaataaaagacaaagacaatagagtatatttggaagaaagggtcagggggctccttgcttctaatggacaagggccctgagctttagagcccttcacattttattgggtaaaagagggagaagggtgggggtgattgtcggtcagcggcttgatttacagcaggcttgcaagactgcattctttgaacaataggctctagatgtcccagtagataatctcagtgagcacagtgccagggaatgattgcctccagcaaaccttctggcggtaggcgcagtcatgagtttgcccacatcctgcattcatgataaacagtttgctgtttggtcatatagcctccagtggaacgctgagttggtcatgtctctcaggccatcggctccctacatctcccctttgtgtttatgtattactgttacagatttgtctaagcattggcctacctaaaagttctgttggagatagggggtagagagaataaacaaaaacaaaggtttttgtggctgtagccgggaggcatgtctctgctgaagcatttgctctataagctataattcctcttcagcctgttaaggggcacagggaatttaaggaagaatctccttgcagggtttggtaaagatgtgtaagttgataggtggcaatacctagcatagggcgtagccaattaatatctcctagtatttgttgaaaatcatttaaagtctataatgtgtctttaccaagaactgctttctatggccgtacactcctctccgtaacaatatttcctacgtaatggtatggggaagttatttgcactttctctggagcaattttgggattccgtttaacaagatcttgctttacatctctgagtaattgatgtaaatttgatctgtaggagtggccagaagaatatcatccataaaatgaatgatatacgcagtgggaaacatattttgagactcctttaatgctcttcctacaaaatggtgacataatgtaggactgttaagcatgccttcaagtaaaacttgccattgatagcaagaaacaggttctctatgattaatagaaggcatagagaaggcaaattgaggcttatgcttctcgtgtaatggtataataaagaaacaatccttaaaatctattactacaagaggccagtctcttggaatggccgccggggaaggtaaaccttgctgtaatgcacccattggtttaatttgtgcattaatagctctcaaatcatgcagcagtcaccgtcttccaggcttttttggaataacaaataccagtgaatttcaggggctaactcacttctctatatgtcctgcattcaattgttcttttaccaacagatgaagttgatctagcttcccctgtgttaggggcccacacaagtttctcactaagccattctaatggtaaggcagtgggcagaggagaaatatgaatgacccccatcagaaatcctgacgtcctagcccttttctgtttttccagttactgagaacgggttagggtttccttgtaggaatttccctaaaccttttctactttcatatcccatgtccttcaacatttcaaatcctgggttaccaaagttttcatttgtaagtctcatatttcatgctgtaagtctccaccccataaattgatggctgtatttacaacataagactggaaagtacctgactgaccatccagaccaagacaaggtaaaatctcagcactctgttgaacacttttagctgctcctactcccactaggggtgtggaggttagtctgagagtcgatgctgggggccagtctttactggatatgactgacacatcagctcctgtgtccattcgcccataaaatttctttcctttaattagtactacacaggtaggtctattagaggctatggattgggatagataagtttcctatgtagttgtgctcccaaaccctttatttcctcatttctccttttatgaagatgggtgtaatttgcagggaataagcaatagctaagcagtatattctcctggttcaaaaacccaaagatcttgtgacattaaaactacttgaatttctccttcataatcggagtcagtcactcctgggactacagtgatgccttgcaagttaaggcggcctttgcctaaaattagttccatgtatcctcttggtaaaggtcctcaaatgccagtgggaattttgataggtttgtctccaccaactactgttatttctcttgactgggagatctaatcctgcacttcctggtgttcctggggtgagggaatcaatgtttctcttgggacccatccctgaaatgggcttgtggtctggactgagaatgccctgattgtttgaggggcccgggtccaggccaccttctcatttcccagcaggaggggtgccattctgatgaagtcttgagtggcactgatgagcccagtgatttcctttgttacagcgaggacagagtgctggcgtttttctgctgggtgttgggggggggcactgcattgtgaagtcctttctgtcctgagatctggtggcattcctttttaaaatgtctggttttaccgcaagtacaacattttcccaatttagcgtttgacccttggctccttttagatttgtcaactactaaattagccatgcttcagctatcattgaagagcaatgaagctcagttccttcatcctaacaagctctgagaaaatttcccaagtcttttgtacaccttacaggtgccagtgcacatttacaatccacgtttgcattctcaaaagctaaagttaaggttagcatttctgtggcagtggcatgaggaatctgacgcttcactgcctcttgtaatctcgcaagaaattgtgcatagggctcctacaacccttgcatgatatgcaaaaaggattgtactaggactccctcatctggaattgtggcccaggcgcatttagcagcctgtgaacgctgctgataagcagcagctgggggtgccatttgatgttccaggtctgaataagggtcattactcaatagcatatcctctgtaatgtctccttgacaagcagcacgattctgtctagcctggtttgcacacagttcttgccaatttaaattccgtgtcagatacgcagtagcagacaagtttgcgccaaaagttttacatcaaagagtagaaggcacgtagcaccgaatacagattctagcaatcctaaagtgaatgggctctgtactccatcgttaactacactcgtttgtaattccttcaacaactaaactctagggtattttcatgaataaactgatgtagattgtttcgatcaggccttatggaaataggaaaagcacaaggtcctaagggctctccagctatggcagcagagtgtaacattctttgtactggggtctctatttctgctactgaaggaggtggtacagatgttgctgcaactggagggggtggtaaaaaccaatttttatcctccctctcctgttttttgttttcaattggatctgtgggtgggacaacagattctttcagatttttagactcagcctgctgcccagcagaataatgagataatggcagaacagtacgaaccagactccacgtgaagatagaagaatcaactttaagacctttttgatgagcctcttttaatccttttcctgctgtgtcccaattttccacatcaagagtgcctgcctgtggaaaccatgggccatgcatcataatctcctgcagaagcttaatgtctgtgaattaacctgagttccaggctgtctcaatagaacttgaaacaactgcacgtagtgtttttttcaacagacaagttctgccccacgttaccctgattcagaaaacttcccgttcgcagtactttagagcaccgacctcatatcgctcccagtacctcttcagggcactgaccttatatccgctgccagccgactcatccaggtttccccattcaccttgtgaatttcagttcctctactccagcagaaccttctttgttcacgtcctcaaagtcctatgttcggaggccacttgtccgacatcctcggagtccctcttctgggtcaccagttgccacctgcacagaccttgggggactgaacgaagggggcgaacattggaataaaagacaaaggtgtatatttggaagaaggggtcagggggctccttctagtgaacaagggccctgagctttagagccctttgtattttattgggtaaaggagatggtggcagggggagggggtggttattggtcagcggcttgatttacaacaggtttgcaagactgcattctttgaacaatagactgtagatgtcccagtagataatttcaatgagcatggcaccagggagtgattaccttcagcaaaccttctggtgtcaggcgcagtcgtgagtttgcccacatcctgcattcatgatagtttgttgtttgatcataaagcctccagtggaatgttgagctggtcacatctcttgggccttcagcttcctacatgtgggaacactcagtccttttctggggatgtgtttcttctggcttgtggaagtaccattattaatgtctatacagctcttcttggatttctgattttccctaagaggctcatccctgcttcttcccagaagttttcagtctctgttgtatttctctgctcatagtctgtttcagatttacccataattctctcgactcctgcagattccccactgctccaatgcatcacctcagttccttgtgttttctgcactgccagcatgatacacacaataccctgatactcctaccaatgtctgagtcaggtgaggcagaatctagaccctctgtcagacactaaagatgccattatcatgggttgaagttccacttttttctttctgttttagagaggagctctaaattgggaagtaatgcaggaaacaagccttgtaaaaatcaacttggattcacttttcagttacatctgagtgatctacagctatttcaagctgaaaggaaaatttctgggtgtaagcattttgaaaaacccgtcagtgacaattcctcagtttcaccgcttgaaaaaatttcttccagtgtcaaatcccaccttttaaataaatatagaaataattttgatcatgctccattacttccacaagaacagaaagcacacattagggaaaaagcttataaatgtaatgagcacggccaagtctttagagcatctgcaagccttactaaccaagtaatccataacgcagataatccttacaaatgcagtgaatgtggcaaggtctttagttgcagttcaaagcttgtgatacatcgaagaatgcatactggagagaagccttacaaatgtcatgaatgtggcaagctcttcagtagcaattcaaacctttcacaacatcaaagaattcatactggagagaagccttacaaatgtcatgaatgtgacaaggtctttcgaagcagttcaaagcttgcacaacatcaaagaattcatactggagagaagccttacaaatgtcatgaatgtgacaaggtcttcaatcaaattgcacaccttgtacgacatcaaaaaattcatactggagagaaaccttacagttgtaataaatgtggcaaggtctttagtcgccattcatatctagcagaacatcaaacggttcatactggtgagaaaccttacaaatgtgaagaatgtggcaaagcattttcagtgcgttccagcctcataacccatcagttaattcacactggaaggaaaccttacaaatgtaaagaatgtgacaaggtctttgggcgcaagtgtttcctgacctctcatcagagaattcatactagagagagaccttatggatgcagtcagtgtggcaagatctttagtcagaaatcagaccttatacgacatcgaaaaactcatactgatgagaagccttacaaatgtaataaatgtggcacagcgtttagagagttttcagaccttactgcccattttctaatccatagtggagagaaaccttatgaatgtaaagaatgtggcaaagtcttcaggtacaagtcttctctaaccagtcatcatagaattcatactggagagaagccttacaaatgtaacagatgtggcaaggtcttcagtcgcagttcaaacctggtatgccatcagaaaattcatacaggagaaaagccttacaaatgtaatcaatgtggcaaggtctttaatcaagcatcataccttacaagacatcaaataattcatactggagagaggccttacagatgtagtaaatgtggcaaagcatttcgagggtgttcaggccttactgcccatcttgcaatccatactgaaaagaaatctcatgagtgtaaagaatgtggcaagatcttcactcagaagtcttccctcaccaatcaccatagaattcacattggagagaaaccttacaaatgcaccctgtgcagtaaggtcttcagtcacaattctgaccttgcacagcatcagagagttcattcatgagagtccctacaaactgtatggcaaaaccatcatcatgagttctagcattaatcaacatcagtgagtccatactaagtggaaatcatataaatgaaatgtatgtgacacaggctttatcaaggcctgccaaatcactggacatcaccacatcactgtggaggatgaaagcacacagatgaattgtgtgtacttgggctattattcaaggaccattgctatagaacacgataggatttacacaagaagtaactctgtctctggttctctgatactaatctatgatattgcatgatgcagaataatgctaagtcaaaatatgttgaatctcatgacctgatgtatatcaaaggtgcaacggcttgtaaatgaccagttttattcaggctataaagcattcaattatttggggcttatagaaaaggctactttactctttgtgacttcgaaatcttttcatgtgccttccatacaggccattcactgtggtccctgggaaagaatcagtaggatgacagggctgacttcattagctgaggattatttctatccaatttcctgatgaaggacattgccttttgagattaaatattgtctgatttagagagcatggaggtgggcagagtaacataaaactgatgaccgtcatcatactgttgcagttagcacactttctcctgacataagtgcacagagcttcagtgtccaccaactgaccatgaaatagagtatgctgtaatcttaaggcataggttattagtgggaagagagtaataggttgctagtgtctgattatatggtagaaataatgcaaggaaaaaggtagccaccttctccattgaacagcagtacctgctgtttagcaaagactgatgagaagtagacttttttttttttggagatagagtctcactctgttgcccaggctggagtgtagtggtgtgttcttggctcactgcaccctccgcctcctgggctcaagcagtccttctgccttagcctcctaagtagctgagactacagacgtgcgccaccacacccagttcatttttgtatttttagtagagacagtgtttaccatgttggccaggcaggtctccaactcctgacctcaagtgatatgttcacctcagcctcccaaagtgctgggattacaggcatgaaccatggtgcccagcctcatttttgaaatggaatagagaacagttatatcacagttgagagtttaatcaaaatgaccggatcagcatattctttttttagatgagacagagtttcgcccttgtcacccaggctgtagtgcggtggcgcgatctcggctcactgcaacctccgcctcccgggttcaagcaattctcctgcctcagcctcccaagtagctgggattacaggcgtgtaccaccatacccagctaatttttgtatttttagtagagatggggtttcaccacgttggccacactggtctcaaactcctgacctcaggcgatccatctgcctcagcctgaaagtgctaggattacaggcgtgagccaccacacctggccagctcagcatattcttaagtaggattcacatttaattcttggtattataagttgcaaccatttgatttagaatgtatgcagctctcatgtttgtagtaataaagtttcatttttcctaagtatgaatgaatcgtgttttctaccgtcataatttcatcccacctcaggaggatggatactctgtagcacacagtaatgcaccattgggattttaagattggagcatccagagcaagttttctggttgtgaaatgaaacatgtcctttggttacatatccttaggtaagtgtgaatatgagtaatcatacttagtacttgaattattgtatctgtgctctgccctagaatgcttctgtgggtacagtgaaagtcccaaagcagtgcaactccagcatcctataccctcaaatgtgtttatagcccttggcaaatgtttagtgtatcattatatttctatgtgcctttttcttgtgtgctaaattagacccatggcacacattctctctttttttttttttttttttttttttgagagtcttgctctgtcacccaggctggagtgcaatggcgcgatcttgactcactgcaacctccacctcctgggttcgagcaattcttctgcctcagcctcccgagtagctgagattacaggcatctgccaccagtcctggctaatttttttgtatttttagtagagacagggtttcaccatgttggccaggctggtctcaaacacccaacctcaggcgatccacccaccttggcctcccaaagtgctgggattataggcttgagccactgtgcctggcccacactttcatttttatgaagcaaaaatacaaatatgacaaatattatgagataaaagtgtgaggataaggttaaaaatagtgtaacacaatctctttttttgtccttgtgctcagtgacataatttgaaattactaatgttcataaatttcctcgtaagggtggacacacagaatggaattgtgttttgctttggtattttaacaaggaacttcacatatttacccccacaacctttgtggtaatttgaacttttgcctactccactagaaccttacaaaaaaagtttttttttttttaaatttgagacagggtctttgttgcacaggctggagtgcagtggcacagttagggctcactgcagcctcaacctccccggctcaagtgatcctcccactttagcctcatgaatagctgtgactacaggcgcacaccaccacacccagctaattttggggtgttttttggtcacagtgttgcccagctggtctccaactcttgggctcaaatgacccacccacctcagcttcccaaagtgctaggattacaggcatgagccatgtacctggcctccactagaacttgtttgacgtccacctaagatttggcttgggtattgagactgatgatgctatgtactgaaggggtctgagaatgtttattacataataagactttctgaggaaagcaggttagacttccccagttggtccaaaaatgtcatgagaaaactgggatagatgactactttgggtgttatgattgttgaagcgtcgggctggggtgtgggtacttacttgtggtttgaactaatacctggtgccaaatgagggagcactcaggctttattatcagttgaccagatgggcatcataatgtagtctcagcaatgcaccaagatgtaacagtctctcatttgagataacactttgggttctttgtcctacctccaagaaaaggagtgtggacataaaagtgagtttggagcgaaagtttaataagcaagaggagaaagctgtctgccagcagagaggggctcctgaacaggagtactcactatgaggtccgtattggggtttttatggactggaaaggggaaggaatgtgcttagtctgcgggctgtcttggagaatgcatgcctcagcttggcccgggacctattagaagctgaagtgaaagcttggcccaggaccaattaggggctgaagtgatgattcatagaagccagacttacagtccaataaaggaacctgaacttattggagcacctgaacttattggagcccactgtgcccatgtccacaaagggagaagaaacttttgcctgggagcccactgactctacaaaggcaaaaggcatttctgtgccaggcctgctcccttatctgagtgagatggaggtctgtgcaagtttttatccaaatgggccttttccatctgtgcagccgtaggcataacaccttgtgctagttcccttatcggtccctgcaccttgaattttttcccaggctgctttttctgttaggtggggatgaggcactgacccatgggccagggactctccagagacccttttcttgctatctacctaaggcaagttaactacctcctttcataggaagaaggaatgcagaggtgtaaaagctgttagtattcagacatcacaaaatgtagtctaactctttagtacaagactaaatacttcttcttgaaactcctgacttcttggttaggaaaaaccccagttttcttcatggtgatagctggttacattcctctcggatggacgtgtaggtttcactgcacctatgattgttgaaaatgcttgtgaattactgtttagtaaagtgtctagtaaaggtgaaggggtgggttgcccctccacacctgtgggtgtttcttgttaggtggaacgagagacttggaaaagaaaaagacacagagacaaagtatagagaaagaaataagggggccccaggggaccagtgttcaccatatggaggatcccgccagcctctgagttcccttagtatttattgatcatttttgggtgtttctcagagagggggatgtggcagggtcataggataatagtggagagaaggtcagcaggtaaacacgtgaacaaaggtctctgcatcatagacaaggtaaagaatcaagtgctgtgctttagatatgcatacacataaacatctcaatgccttacagagcagtattgctgcccgcatgtgccacctccagccctaaggcggttttcccctatctcagtagatggaatatacaatcgggatttataccgagacattccattgcccagggacgggcgggagacagatgccttcctcttgtctcaactgcaaagaggcattccttcctcttttactaatcctcctcagcacagaccctttacgggtgtcgggctgggggacggtcaggtctttcccttcccacgaggccatatttcagactatcacatggggagaaaccttggacaatacctggctttcctaggcagaggtccctgcggccttccgcagtgtttgtgtccctgggtacttgagattagggagtggtgatgactcttaaggagcatgctgccttcaagcatctgtttaacaaagcacatcttgcacagcccttaatccatttaaccctgagtggacacagcacatgtttcagagagcacgggattgggggtaaggtcatagattaacagcatctcaaggcagaagaatttttcttagtacagaacaaaatggagtctcctgtgtctacttctttctacacagaaacaatccgatctctctttcttttccccacaaaagttgcctgagatacgttttatcctagttcaatgaaaattattgtacaaaagtgtttattataaaatcaacatgatttgtttattgtttattgattatataattatatttattatacaataaatatgattttgctagaagagcattttgccaaaagttgtggaaatgtcattgtcagattatggtatgaagcaattttttcaggctgagtgggggtggctcacctgtaatctcagcacttcgggaggccaaggtgggagaaatcacttgagcccagaagttcaagaccagcctgggcaacatagcaagagcttatgtctacaaaaaaattttaaaaatagccgggtgtggtcatgtacacttgtggtcccaactacttaggggcactgcagcaggaggatcgtttgatgccagaaggctgaggctgctgtcgtccttgattgtaccactgcactccggcctggatgacagagggagacactgtgtcaaaaaaaatttactttgtgcttctttatatgagttacattaaaaatcttttataaattgcagtccaggttccatgtctaatacgtttcttccatgtgttacttgagtgaaaatttacgggctacataaatatggctgttgtttggaaagaaaatgttgtgacattagtatgcgcacaagacaatgggaagtacgaactaggattcctgtaaatacgagaaaggaaaagaatgcttttactatgttagaagacttaaaatcacatgaagtgattccagtctttctgttgttattccgatgttttagctattttagattttggggtttggcttttttttgtttcattgcctttctacataattggataaccttgttagtatctgcagaatgccctgattaggaaatgtgttaaccctatgtgtcaatttggtataatttcatattgttttcatattgttttatgtggagtcttccaataaatgtatattgtatatgtgtctgtatttggtgtctttgatttctttcatcaacattttgtagttttaacataatggttctatgaatgttttgtttggcacgtatttctttgacttttttttaagacacagtctcactctgttgcccaggctggagtacagtggtgtgatctcggctcactgcaacctctgtctcctgagttcaagcaattctcctccctcagcctcccaattagctgggattacgggcacgtgccatcactccaggctaatttttgtatttttagtagacatggggtttcaccatgttggccaggctggtctcgaactcctgtcctcaggtgacctgcccgccttggcctcccaaagtgctgggattactggcatgagccaccatgcccagctgaccgatattgttaatggagcaatcatacatggtattttatttttaataccagctttcatgtgtaaagaaatatgctagattattattattattattattattttgaaataacgtcttactctgtcacccaggtatagtgcagtggagcgatgtcagctaagtggaacctctgtcctgcagctttaagtgaccctcccaccccagctgcctgagtagctgagactgcaggtgcgtgccaccacggccagctaattttcgtgttttgtagagacagggttttgccatgttacccatgctggtctcaaactcctgagctcaagcaatccacctgccttggcctttcaaagtgctgggattacagggatgagctgccatgcctggccagtgaaatatacaagattgctgtatgttggccagcgcggcggctcatgcctgtaatcccagcactttgggaggccaaggcgggtggatcacaaggccaggagttcgcgaccatcctggctaacacggtgaaaccccgtctctaccataaatacaaaaagaaattagccgggcgtggtggcgggcgcctgtagtcccagctactctggaggctgaggcaggagaatggcatgagcctgagaggcagagcttgcagtgagccgagatcgtgccactgcactccagcctgggcgacagagtgagactccgtctcaaaaaaaaaaaaaaaagattgctgtatgttgatcttataccttgccacctttacatttcccttgtttagagatttttgtagattttttggaattttctacataaaattatttcaccagattcttattgctaccacacagtgattggcttaaaacaagaaaaatttatttttttacaattctgtaggtcacatatctaatatgggtccacagttctatgattcttcatgaatctccaggcaagaattttttttccttaccctttgtaggttccagaggccacttacatcctttgactcatggtccacttcctccatcttttttctgagatggagtttcgctcttgtgtccctggatggagtgcagtggcacgatcttggctcaccgcaacttccacctccctgattcaagcgattctcttgcctcagcctcacaagtagctgggactacaggcgcgtgccaccacaccgggctaatatttttattatttttagtagagacggggtttcaccgtgttaaccaggatggtcttgatctcttgacgtcgtgatctgctcgcctcggcctcccaaagtactgggattgcagtcatgagccaccacacccggcccacttcctccatctttacaggcgagataaaatctctttatccctctattttcaacacatcacaactgtccgtccctcagggtctacctgcatccttctgatattgaaccttgtgattctatcactttgaccatataattcaggataatgtctatctaaagatccttaactagaccacatttgcaaactcctctttgccacagccagtcacacaggttacagggttgaggatatgagaacatattcagtaacacaggttacggggatgacctgtgcaaccatcatattttctgagagtacactattttttttctcctgtcctcaagccactctccttcctcattgctaccacacggtgattggcttaaaagaacaaaaatctattcttttacaattctgtaggtcatgtatctaatatgggtccacagttctgtgattcttcatgaatctccgaaagtgctgctattacagccctcagataccacatccagcctgtcacttttatttccttttcttcctttatttcactggctggaacttttcacactgtgtggaatagtagtgataaaagtggacttccttgcctcatcccctacccctgggggaatctttatgtctttcaccagaatgtatgatgatcctttttaaattggtgggtgatcttgagttgaggaagtgtccaatgacactgttttccataccatctgcagtcttgtttttctgaaaaattactttttttattggcaactgtcaaaagagatattctcaagacttggaacaagggcagaaacccctagacagatggttttttcttttcttttctttttttcttttttgtttttttgagagagagtctcgctcttgttgctcaggctggagtgcaatggtgcagtcttggctcaccgcaacctctgcctccccggttcaagcgattctcctgcgtcagcctcccaagtagctgggattacaggcatgtgccaccacacccagctaattttttatttttagtaggcggggtttctccatgttggtcaggctgctcccaaactcctgacctcaggtgatccacccacctcagcctcccaaagtgctggattacaggcatgagccactgcacccggcgttttttttttttttttttttttttgttgttgttgtttttaattcatcaggctggagcagtgtttaaaccaatctggagttaccattccagctatggccacaacctgatctctacatcttggccttcttcacattggctggaagctggctcacttcacccaagggcgtagtttgacggcattcatgctttccacaagtttgagcatccctcgctcctggcactggcagtgccactcagccatggactggggcatccacttggtctggcacttgtataaatagaagccgtaaccgacaacctcggtgaggtctgaagactccagagccttcagcacgagcatgaccttgctcacctgctcgatgtaagggatttgagatcagtctgggccaaacatggcttccagcagctgcatctggacctggagcacctctggatctttcaggaagtttcacccatggtgggatatttctacatctgggattgttcccaacttgtaaccctcacaaccaaaactatgctcccgcatgagccgggcctaagcgttcatcagtatttttgattcccaccaaatgtatgaagattacaatttcttcacagccttacttgtgaagcaggttcactgcacactggttaccaacgtgttggagttgagtgagagatagtcccatgaacacacagtaagttacatgaagtgaatttgttacagattggcagcaacgacagcagatgcctggggttcatgcatgctgttcccgaaggctcaggaaaaccacccagttcagatgcagtctgcgtgtgtgttcctcccgcatcacagctgagggagcctgaaaggcggcctggcccaggtttcatgctccagggatgcatggcacgttggcctaaaacaatgaagggcatcctgttctgaggggactggaacagatcctgtccttctctggtaaggatggacaggatcctgtccttctctggtaaggatggacaggatcctgtccttcatctcagtatgttgcttttctagcacattttatattcattcttgggaactacaagtgagaagtcagacgcaactgggccagttcaaccccacttgagtgctgtcttgcagtctccccaccaacccagtatcccctttaataaagctagtcaatttatgtgtgcactgaccttcctggatctggaggtagaggcttgtctcaggagattgaagtaatatcttgactggcagaatctcagcgcgacatcactgaggtacagccagttgcatttcactaggctcaagaggattgctgcctcaagcaggataaccaggcctgcctggaacagtgccatagtccgggatcccagtgacctgggtgagaagttgctattcaggtcaaagaaaatttcttcaggtgaccccactgtctctagccaatagtcctgcttgtggatcttacgtatttgtgtttcaaaactacctgaggtcctgatgtggggtccttacctcctgtgcacagtgactcatgcctgtaatttgagtactttgggagtgtagacagaaggaaaacttgaggccagaacttggacacccggctgggcaacaaagtgagactccatctctacaaagtaataataatatataaaactaaaaaattagcacagtccaatgtcacaggcctgtacttccagctactcgggagactgaggtaggaggtgcccatgaccccaggaagtcaaggttgtagtgagctatgattgtgccactgcactccagcctggatgtcacaggttgattccctgtctttaaaaaaaaaaaaaaagtcttaaactaaataatttatacctatttttaaagttattggcttttttaaaaagagttggtgacctgacttcacactgaccttagtcctctatgcccaaggtggtgtccctaggaaagtttctggaattgagcacagggttgacctcaccctctggagtgaatggggaatgtaaatgaaaagtatttctagccgggcgcggtggctcacgcctgtaatcccagcacttagggaggctgaggcgggcggatcatgaggtcgggagatcgagactacggtgaaacccagtctctactaaaaatacaaaaaaaattagccaggcatggtggcgggtgcctgtagtaccagctactcgggaggctgaggcaggagaatggtgtgaacccgggaggcgaagcttgcggtgagccgagattgtgccactgcactccagcctggacgacagagcaagactccatctcaaaaaaaaaaaaaaaagtatttctattctatggggcattggcatgatactgcgcattccactctggcagggtttagcatttcacactttagcttccatccccttcacagatagttccaaagtgtcttaattcctaaaatttgtctttctggctgggcatagtggctcacgcctgtaatcccaacactctgggaggccgaggcgggcagatcacctgaggtcagaagttcaagaccagcctggccatggtgaaaccccgtctctactaaaaatacaacaaattagtcgggtgtggtggtgcgcacctgtaatcccagctactcgggaggctgaggcaggagaatcacttgaacctgggaggcataggttgcagtgagccgagatctcatcattgagcttcagcctgggcaacgagcgaaactctcaaacaaacaaacaaacaaaaaaaatgtctttctttcgttctttcttgtctctccctttttctcacacacaggcacagacacctacattcttttctttgttgcactatttctctctagtcttattttctttctttcttttcttttttttttttttttttgagacggagtctcactccatcgccaggctggagtgtagtggtacgatttcggctcactgcaaccctgcctcccgggttcaagtgattctcctgcctcagcctcccgagtagctgggactacaggcgcccaccaccacacccagctaatttttgtgtttttagtagagacgggggtttcatcatgttggccaggatggtctcgatctcctgacctcgtgatccgcccggcttggcctcccaaagtgctgggattacaggagtgagccaccgcacccggccttgtctttctttttgctttcttttcacgctctcttctctctctgcttccagagtagttgggacttaaaatttattgtaataacaggaattctcgtggatctaatctaatcaccaaccgattttgctctgccccagcaagatctgtttacagatctgtttacagaagtgctgagcagatctcgcctccaaaaccctaaaacaggatcgctgagtcagactgacagaagcatagaccccgccttgagcccgccctgtcccggccctgccctcggccccgggcccggcctgtacgatgcgcgcgcaatttcctgcagacccggaagtcgagatcatggagtgaacgtttcgcgcgctttttcctgtagacccggcacccgactgcgcggaaagactgtctaagccgccactcgtgagtttgcctttgtctagattaaatttaggctgcccagttcctgtgtgcttctacacccgcgatctgagggctcatgcagaccttgaagtcccggcaccgctctatccactccaagtaaattcagacattctctagagagtctggaggtcgcttacctgcgtgttaaaaccgcttggaggcttctaggccgggcgcggtgcctcacgcctgtaatcctggcactttgctatttttttttcattttttgtaattattcagtctagttgattgaatccattgatgtgtaccccagagataccaagggctgactttagactgtatctgctcgttagtcacttaatagtctttttttttttttttttcctgagactgagttttgctcttgttgcccaggctggagtgcaatggcgtgatctcggctcactgcaaactccgcctcccggattcaagcgattctcccgcctgggcctcccgagtagctgggattacaggcatacgccaccatgcctctctaattttgtatttttagtagagatggggtttcaccatgttggccaggctggtctcgaactcctgacctcaggtgatctgcccgcctcatcctttcaaagtgctgggattacaggcatgagccaccgtacttggccaatagtcttttggatgagatccacttttatggtatctcagtgcttttttttcatgtaacccttttttttttcccttaacaatgccctccaggcacatgagtattgattgatgctgacaattttttttttgggtttttttgagacagagtctcactctgacgccaaggctggagtgcagtggcactgtgttggctgactgcaacctctgtctcctgggttcaagcaattctcctgcctcagtctcccgagtagctgggattacaggtgtccaccaccacggccggctagtttttatatttttagtacagacagggtttgaccatgttggccaggctggtcttgaactcctgacctcaggtgatccacctgcctcggcctcccaaagtgctgggattacaggcgtgagccactgcgcccggccttgatgctgacaatttggatatgccagtgagaagctgtaacatggagtctttaaggggaattaatagggtttagtactgatggaggtttcaggcatccattggggctcttggaacatagtgcacatcgataaaaggattctactatagtctatatctagaattgagcactgtgatccacagagggctgaggggcctgtgctctgcatgagctttggtcagggtgaggtctgtgctttttttttgtttttttttgagatagagtcgcactctgtcacccaggctggagtgcagtgttaaaatcttggctcactgcaacctctgtctcctgggttcaagcaattctcctgcctcagcctcctaagagctgggattataggtgcctgccattacccagctaaattttgtatttttaggagagacggggtttcaccatcttggccaggctgatcttgaactcctgacctcgtgatcgacctgccttggcctctcaaagtgctgggattacaggcgtgaaccaccacacatggccttttttttttctttttcttttttaagatggagtttcaccctgtcacccaggctggagtgcaatggtgcgatctcggctcactgcaacctctgcctcccaagttcaagggattctcctgcctcagcttcctgagtagctgggattacaggcccgtgtcaccacgcccagctaattttttgtatccttagtagagacgagggtttcattatgttggccaggctggtctcaaactcctgacctcatgatctgcccacctcggcctcccaaagtgctaggattataggtgggagccaccgcacccggccaagtctgtgcttttaaggggagcttagtcaagcccagctctgcactgctgcagtgtgtgtgtcgctcaccatgagacaggagagagttttgaggaagggagtaaaaaactcacttgttgattttcctgtgggagatcaacagtaggcagcagaggaccatccttccagaaggtgaagtcttccctttttgtgtggctgtggcacaggaagtgggtgtgttgattctaagccctaaacagcattatttttgatactaggattcactttcaaagagacatattatgcaaggaagcaactcggaagaggaaagaaaggaagtcaggaatggcccttactcaggtaaggtaatgttctcagtggattgttctgtctctgtttcttcctgaaatgccaggcattggagttgctaatctctgactctgaagcatcctgcctgactcatttcattgcacttacccatggcttcttccagtccctttcacttccacttaagattccagttccctatgacccaatgacatgaacttgggaagaggttccactgggcatggtcctgggaagtgctcacacccagacacggatggagatggggtgtgggccttgtggtgtcagtgctgttgggcagcagggattgttcaggggccacatctggatgcactgtgagtgttctgtggactaagactagagaagctgcatgtggaattcctttttttttttttttgagacagagtctcgcactgttgcccaggctggagtgtggttttgtgatctcggccatataaatgtatatgtgtactagtgtatatgagtgttagtatatatatgtgtaagtgtgtacatgtgatgtgtttgcatgagtgcacagatgagcaaacctatagtttttataaatagcatgtcatcattatatatatatatatttttatcagttgaaattacatctatttatcaggatgttcaaatttttctacattatcatgtatgatgatatgaggcatcatacctgatagtggctataagaggcaatgaggcaatggctataagaacattatagtaatgtattatggggatatcgattatatatatgcatatataatgaactattaggcaattccatgtttttaatccttgaagttgttttaaatttactgaattaggtaactgtcaatttacttttgatgctgatctgttacttaactgtctgattctttaggtttgattctcatgctcagacacctgtgatctgctgcttactctgctgtttcagttctcacacctggggcaagctagcgtgtatgtgaaagagttgtctttttagtaagataggagcagattattctttcattggcttttgttgctgtaccagttagttcatgtaaatcattgagaatagtgcctatcacatgggaagtgttctattcagccattgctgttgttatcatcgcagttttcagattttcaccattttttatttattttatttatttatttattttttttgagacagggtctcgccctgtcacccaggctggagtgcaatgatgcaatctcggctcactgcaacctctgcctcctggcttcaagccattctcctgcctcagcctcctgagtagctgggattacaggtgcacacctccatgcccagctcattttttgtatttagtagagatggggtttcaccatgttagccagtctggtctcgaactccttacctcatgatccacctgcctcggcctcccaaagtgctgggattacaggtgtgagccactgcgcccggcccagattttgaccatttttaaaaaccactataggtcggatgtggtagctcatgcctgtaatcccagcatttttggaggctgaggtgggaggatcacttgagcttaggcctttgagacaagcttggacaatgtggtgagactctatctctacaaaacatacaaaaattagctgggcatagtggtgtgagcctgtagtcccagctactcgggaggcttaagaggatcacttgagcctgggaggcagaggttgcagtgggtggatatcacacccctgcactccagtctgggaaacagtaagatcctatctcaaaaaaaaaaaaaaaaaaaaaaaagaaagaaagcactgtagacattgtcatctctgaagacactacttgtatctcaggtagatactaaatgtcacttgatgtgtcaaaaataaaacctaacatttctttctctttttgggggggggaggggacggagtctcactctgtcacccaggctggagtgcagtggcgcaatctcagctcactgcaatgtcccactcctgggttcacaccattctcctgcctcagcctcctgagtagctgggactacagacccccaccaccgcgcctggctaattttttgtatttttagtagagatggggtttcaccgtgttggccaagatggtcttgatctcctgacctcgtgatccgaccgccttggcctcccaaaatgctgggattacaggcatgagccgccgtgcccggcagtaatacctaacatttctatacagataaccctggtttaattttttgtttgtattgcttgtattatccacaaaatgagacatctactctgatttaaagaatgtcatcactccttatggaaaagtataataaaacacaatcacagacacataactagctcaagaatcctttaatgtggatttggcgcagtgctcgcttcagtggagtgagtccttacaactgtcttctcattctgtttgaagataagtactctctccataccctgtttttgaaatgtggatttccttttaggggcaattgtcattcagcgatgtggccatagaattctctcaggaggagtggaaatgcctggaccctgggcagaaagctttatacagggacgtgatgttagagaactacaggaacctggtctccctaggtgaggataatgtccgtccagaagcctgcatctgctctggtatatctttttgcattttctcttgtgtgtctctcgggagcccctgcattgcttgactgagattgaaacctgttgactaagaaatgaaaagcaggccaggcgcagtggctcacgcctgtaatcccagcactttgggaggccgaggcaaatggttcacgaggtcaggagatcgagaccacggtgaaaccccatctctactaaagatacaaaaaagggtgcctgtagtcccagctactcgggaggctgagacaggagaatggcgtgaacccgggaggcggagcttgcagtgagccaagatcgcaccactgcactccagcctgggtgacagatcaagactccgtctcaaaaaaaaaaaaaaaaaaaaaagaaatgaaaagcattatgctttctgaacttgaaatgtccccttacaccagcctgaccaacctggtgaaaccccatccatactaaaaatacaaagattagttaggcatggtggtacatgcctgtagtcccagctactcgggagactgaggcaggagaatcacttgaacctgggaggcaggggctgcagtgagctgagatcatgccactgcactcaagcctgggcaacagagtgagactctgtctcaaaaaaaaaaaaaaagaaagaaatgtcccctttcttcagatattctgcttccttcatgattcatcattgatggcaccagggctgaagtgtgcatgaaaccttatgacagacttaaaaaatatccagttccctgttttctacccatgtgcttttgattcagtagttcttgaaagggggcttgacgtctacatgttacaatgttcccttagcattcagaaggatgcaatcagtggttgaatttgtgaaatattattcttgattaatttgtaatatgctgtctcctacctaaatatagggcttggactttggagatgccacagcacacatttattctttctttttgtaagtaggaatctgtcttcctgacctgagtgttacctccatgttggagcaaaagagagatccctggactctgcagagtgaagtgaaaataataaacaatccagatggcagggagtgcatcaaaggtgtgaacacaggtgagagctcaggtgggcagagtggaggccccataatttttgtattttgagaagggtctcactctgtcatccaggctggagtacagtggcaatcatagctcacagcagccttaaactcctggacttaagggatccttctggcttggtcttccaaagtgttgggattacaggcttgagccactatactctgcagagccacactattacatagtgtttgggaaactctgcaagtgggtgaattctgtgggaaaaccaaagctgaaatcctttgagttgtgaacagacatttttcattttcttttttctgttttgagatagcgtctctctcctgtcacccaggctggagtgcagtggcatgattatggctggctgcagcctcaccttctggggctcacgtgattctcccacctcagccttctgaatagctgggactctgtgtgtacaccaccatgcctatctagttttttgtatttttagtagagatggagtattgccatattacccaggctgtacttgaactcctgacctcaagtgatccacccacctcagcctcccaaagtgctgggattacaggcatgagccactgtgcccagcctcacataatgatttttgagttctaattaactttctcagttcttctttatctaggaaagcctgaattatttttgtagatgagttttactaaatatagtattcttcattgatgtttttcttatttttcttcttcttctttttttttttttttttgagaccgtctcactctgtcacccaggctggagtacagtggcatgatcttggctcactgcaagctctgcctcctgggttcacgccattcttctgcttcaacctcccaagtagctgggactacaggctcccgccaccatgcctggctaattttttttgtatttttagtagagacggggtttcaccgtgttagccaggatgttctcaatctcctgacctcatgatccacacacctcagcctcccaaagttctgggattacaagcatgagtcaccgtgcccggcccttatttttctttaagcactttcagtatcacttcactgccttctaccctgaagatacctgctggaaaaatacacatagacttatacagtttcctattatatgtcaagtctctttttttgttgatgctatcaaactttgtctctgtctctctttgacttttgataatttccttatattatgtccctgtgtgaatgtctttgggctaattttagtaatggtcaagcttcttgaatttgtatattcagttctttcctcagatgtgtgatgttttaacattatttcttcagttgtggcttttcatcctttgtcatcttcatatgaacctccaatagtttgtatattgttccaccttatagtctctcaaaaatgtattagggtttgtaaggttttcttcatcatgttttctttgtggtctttggaactgatacttttgaataacttatctttcagtttgctcattgttttcctttccttttgctgtctgctgttaaaccccctaatggatttttacatcagttactgtatttcagctccagaatttctgttctcttgtttttaatgatttcccctgtgtttgttatcctcattcttttcacatactgtttttctgattttatttagttttctatttctgttatcttttagtttggtgtctggagttttatttatttatttatttgttattcttctagccatattttctcatcttttcataggccttgtatggtagtttttggtttaggtttggtaaaacaaccacttttttcagttattttttataatgcgcagtgggagaccttagttgctgtaagggtgtgggaacactccattcttttctgggatgtatctttcctgactttgtgaaagtactattacaaatatctacattgctgctcttaaatatcttattttccttaagaggcttatccctgctttttcacagaagctgttagttactcttgtatttgtcagcttataatctctctcaagctttcccttaattcccctgactcctgcagattccagattcttcagtaaatcacctcactcccttgtgttttctgcattaccaacatgttatacaaagtatgctgatactggccaggcacagtggctcatgcctgtattcccagcgctttgggcggctgaggcaggtggatcacaaggtcaggagtttgagaccagcctggccaacatagtgaaaccccgtctctactaaaaataaaaaaagttagccaggcatggtggcaggcacctgtaatcctagctacttgggagggagaattgcttaaacccaggaggcagaggtagtagtgaactgcaatcacaccattgcactccagcctgggtgacaatgtgagactccatctcaataaaaacaaagtatgctgataatttcaatgtctgagtgaagtgatgcagaatcttgttttctgtcagactttaaacatgccagaatcgggattaagttctaaaattttcttgcttttctagagaagagttctaaattgggaagcagtgcaggaaacaagtcacttaaaaatcaacatggattaactcttcagttacatctgactgaatggcagccatttcaagctgtaaggaatatttatggatgtaagcatgttgagaaatctatcagtgacaattcttcagtttcaccagttcaaataagttttttcagtgtcaaaacccatatttttaataactacagaaatgattttcttttttctacattactcccacaagaacagaaagtacacattagggaaaagccttatggatgtaatgagcatgggaaagtcttcagagtgtcttcaagccttactaaccgtcaagtaatccacattgcagataaaacttacaaatgtagtgactgtggcgagatctttagtagcaattcaaactttgcacaacatcaacgaatccatactggagagaagccttacaaatataatgaatgtggcaaagtcttcaatcagaattcacaccttgcacaacatcagaaaattcatactggacagaaaccttacaataacaaagaatgtgggaaagtctttagtcaccatgcctaccttgcacagcataggaaaattcatactggagagaagccttacaaatgtagtgaatgtggcaaagcatttagtgtgtgttccagtcttactgctcatcttgtaatccatactggagagaaaccttatgattgtaaggaatgtggcaaggtcttcaggcataagtcttccctaaccactcatcagacagttcatactggagagagaccatacaaatgtaatgaatgtggcaaggggtttagtcgaattgcattccttgcaaggcatcggaaagttcatactggagagaaaccttacaaatgtaatgagtgtggcaaggtctttattggcaattcacgccttgcacgacataggaaaattcatactggggggaggcgttacaaatgtaatgaatgtggcaaagcatttagaacgtgttcagatctcactgcccatcttctaatccatactggagagaaaccttacgaatgtatagactgtggcaaggtcttcaggcacaagtcttccctaacctatcactgtagaattcatactggagagaagccttacaaatgtaacgaatgtggcaaggtcttcagtcagaattcaaaccttcaacgacataggaaaattcatactggagagaagctttacaaatgtaatgaatgtggcaaggtcttccgtcagaattcacaccttgcacaacatagggatattcatactggagagaagccttacagttgtaatgaatgtggcaaggtcttccgtcggaattcacaccttgtgcgacataggaatgttcatactggagaaaagccttacagttgtaatgaatgtggcaaggtcttcagtcggaattcacaccttgcgcgacataggaatattcatactggagagaagcctcacagttgtaatgaatgtggcaaggtcttcagtcggaattcacaccttgcgcgacataggaaaattcatactggagagaagctttacaaatgtaatgaatgtagcaaggtcttcagtcggaattcacgccttgcacaacataggaatattcatactggagtgaagccttacagttgtaatgaatgtggcaaggtctttagtaaaaattccatcctagtacaacattgcagtattcataccagagagaagccttaaaaatttagtgaagctggcagggcgcagtggctcacgtctgtaatcccagcactttgggagtccgaggcaggtggatcatgaggtcaggagattgagaccatcctggctaacacggtgaaaccccatctctactaaaaatacaaaaaaaaaaaaaaaaaaaaaattagctgggtgtggtggcaggcacctgtagtcccagctactcaggaggctgaggcaggaggatggcatgaacctgggaggcagagcctccagtgagccgagtgagccactgcactccagcctaggtgacagagtgaaactccatctcaaaaaaagaaaaaaaaaaaatgagtgaagctgccaagcatggtggctcacgcctttaatcccagtactttgggaggccaaggtggccagatcacctgaggttagaagttcgagaccagcctgaccaacatggagaaaccccatctctactaaaaatacaaaattagctgactgaggtggcaggcacttgtgatcccagctactcaggaggctgaggcaggagaattgcttgaacctgggaggcagaggttgtgatgagccgagattgcaacattgcactccagcttgggcaagaggagcaaaactctttctttaaaaacaaaacaaaaaaagttatgaagcctcacaaaagtaataaatatggcaaagaatttcatatgaaatcatgcctctctacccatctattaatccatactggaaggaaaccatagaaatataaagaatacaagaaggtcttcaggcacatgttttccctaacctctcatcaagagaattcacactggtgattgactttaaacatataacaagtgtggcaacgtattcacttaaaatacacaccttgtaaactatcacagaatccatactggagagaaaccttacaaatgaatgacagcatcttcaaataaaatgcacatctggcacaacattggaaaattcatactgtagataccttttaaatgtagcaaatatggcaaagtcaaagtcacaattcacatcttgcacatcaaataattcatactggaggctgggtgcggtggctcacgcctgtaatcccagcactttgggaggctgaggcagacggatcagttgaggtcaggagtttgagaccagcctgaccaatgtgttgaaaccccatcactactaaaaataaaaaaaatagctgggtgtggtggtgggtgtctgtaatcccagctactcaggaggctgaggcaggagaatcacttaaacccaggagatggaggttgcagtgagccaagaatgcgctactacactccagcctgtgtgacagtgagattctgtctcaaaaaaaaaaaaaagaattcatactggaaggaagcgttacaaatgtaatgaatgcggcagagcattgagaaggtgttcaggtcttaactgttcattttgtaatccatagtggagataagtcttttttttttttttcccccgaaacaagagtctcgctctgatgcccaggctggagtgcagtggtgtaatctcagctcactgcaaccgccacctcctaggttcaagcaattctcctgcctctacctcccgagtagctaggactacaagcacatgatgccatcatgcctggctaattttttgtatttttagtagagacggggtttcaccatgttagccaggctggtctcgatctcctgaccttgtgatccatctgccttggcctcccaaagtgctgggattacaggcatgagctgctgcacccagcttgagaaatcatatgaatatatggaatgtactccaggcatggtggctcacacctataatcccagccctttgggaggccaaggtgagaggattgcttgaacccaggagtttgagaccaacctgggtaacataaggacaactccatctctacaaataataaaaaattagccaggtgtgttggtatatgcatgtattcccagctacttgggaggctgaggcagaaggatcatttgagcctaggagcttgaggctgcagtgagtcatgtttgcagtactgcactccagcctgggtgacagagtgagaccctatctacaaatataaacaaacaatgtgaaacgtcttcagtcacaagtattccctaacaaatcactatagaattcatactgcagagaagccttacaaatgcagcgaatgtgacaaagcatttagataatgttcaggctttactgcccatcttgtaatccatactgcagacaaaccttacaactgtaatgaatgtggcaaggtctcaaattgaaattcacatcttgcgaatcaccacatagagagaaaccttacaaatacaaatcaccacatagagagaaaccttacaaatacaaatcaccacataatggagagaaaccttacaaatgcaacatatgtggtaaaatgttttagtcacaattcacaccttggacagcatcagataatttattcatgaaagagtccttacaagctgtgtacggaaagctcgtcatgagttttagcattaatgaacatcagaggttccatactaaggagaaatcatataaatgtaatgtatgtggcacaggctttcctgaggcctgccaaatcactagaaatcaaaatatacttttggataaaacgacacagatggattgtatatgctgaggatatccaaggaccattactatagaacatgaaaaggatttaattattgttttcttttttcctaaaagtgttgggaacaggccaccaaaactggccataaacaaaatctctgtaggactgtgacatgttcttgatgggcatgacacccatgctgaaggtcgttggtttaccagaatgatggcaaagaacacctggcccacccagggcagaaaaaccgcttaaggcgttccagaaccacaaataatagcatgtgcattctgtgccttaaggacatgttcatgctgcagataactaaccagagcccatccctttgtttcccataaggaatgcttttatgtaatctataatcaatagaaacaatgcttatcactggcttgctctcaataaatatgtgggtcaaactctgttcatggctctcagctctgaaggctgtcagtcccctgattttccactccacactatatttctgtgtgtgtgtctttaattcctctagcaccgctgggttagggtccccatgactgagctggtctcagcagaaagctactttcctctttataactttcaacctgaactttgagatcttgacatatacctcctcctacaggcctttcactgtggtctctgggaaagaatcaagtgaaagaatcaataggatgacagggctgatttcattagctgaggatcacttctattcagcttcctggaagaagaacactgtctttttatattaaatattgtctgatttagacagcatggacatgggtagagaataacataaaatgatgactgcttgaagcagtcacgcttattcttttcttgagtactgcccactcttttcttgacaaggatgcagtacttctgtgctctaataaataactgtaaaatagagcatgccattaaaggcatggcatttttatgggaagagaataattgttgttaggtattgattacgtggtagcaatcatggaggggaaggggtggtcacctcctcaattgaatagcaatagttcctgtttagcaaagatggaaaacagtagtcttatttttgaaatggaagagaaaacatgcattttctcttaagtctgagcacacagaatgggaatgttgttaattttcgataacctgatgacagtgtgcctaggtgattatctttttgcgatgaatttctcatgtattctttgagcttcttatgtttggatgtctaggtctctagcaagcctgggaaagttttcctcagttattaccctaaatatgttttctaaacttttagatttctcatcttcctcaggaatgccaattattcttaggtttcatcgtttaacataatccgagacttcttggagactttgttcatattttcttattttttctttgtctttgttggattgagttaattcagaaacctcatcttacgttgggaggctgaggtgggcatatcaccaggtcaggagttcaagaccagcctggccaatatggcgaaaccccatctatactaaaaatacaaaaattagttgggcatggtggtgagtgcctatagccccagctactcaggaggctgaggcagaagaattgcttgaacctgggaggcagaggttgcagtgagccgagattgcgccattgcactccagcctgggtgatgtagtgagactccatctcaaaaacaaacaaaaaaaatcaccttgtctttgagctctgaaattctttcttctgcttgtttaattctattgctgagactttccagagcatattgcatttctgtaagtgcatccattgtttcctgaggtttttgttttttatttatgctatttatttaactgaaatttctcccctcatttattgtatcattttatttctctagtgcctccttgattagcttaataactgaccttctgaattatttttcaggtaaatcagggatttcttcttggtttgtatccattgctagtgagctactgtgattttttgggggatgttagaaaaccttgttttgttatattaccagagttagctttctggttccttctcatttgggtaggctgtcagagggcaggtctagggcttaaggatgttgttcagattcttgtcccatggggtattcccttgatgtagtactctcccccttttcctagggatgtggcttcctgagagctgagctgtagtgattgttatctcccatctggatgatctagccacccagcaggtctgccaggctccaggctggtactgggggttgtctgcacagagtcctgtgatacgaactgtctatgagtctctcagctgtggacaccaggacctgctccagtgtaggtggcagggggacgaaatggaatctgtgagggtcctgagttttggttgtttaaagtactatttttgtgctggttggcctcctgctaggaggtggtgctttcaagagagcatcagctgtggtagtatggggaggattaggtgggggcagggcactagaactcccaagagtatatgccctttgtcttcagttaccagggtgggtaaggaaggaccatcagttgggggcagggctaggtgtgtctgagctcagactctccttggcaggtcttggtactgctgctgtgggggatggggttgtggttcccaggtcaatggagttatgtttctaagaggattatggctgcctctgcagtgtcatgcagattgtcagggaagtgagggaaagccggtagtcataggcctcacccagctcctgtacaacccaaaaggccagtctcactcccaccgtgcccccatgtcccaacagcaggaagtctgtttccaggcagtgggcaagcagggctgagaacttgccccaggctaccagcctcccaactacaaaagcaagtaaggctttcgtgcctcccagcctgtggagtctgcacactggattcacgctcttccatgagttttggccaggagacttctcattcagttggaattgttacaaagttcaactggaggtttccttctccctgtggccttttcccagtgcctcttgcagccttcccccaggacccctgtgaggcaaggcagaaaatggcttgctaggggacccagagagcttttcccgctacccttgtttttcactcagctaatttttttttttttttttgagacagagtcttgctctgtcacccaggctggagtgcagtggtgcagtctccgatcactgcaacctccaactccagtgctcaagcgattctcctgcctcatcctcctgactagctgggattacaagcacatgccaccatgcctggctaatttttgtattttttgtagagacggggtttcaccatgttggccaggctggtctcgaactcctgacctcaagtgatccacctgcctcagcctcccaagatgctgggattataggtgtgagccatagcacccagcctcagttctctaaattgactgagttccaggtaaggtcagaatcttctcccatgatctagaccttcaggtttgccagtgacggtttgtgttcttggcagacaatcttcctttcccacttacacagtttgggcactcacagtatttggggtgtctcctgggtcctgcgggagcaagagcaaccaacttccttcagaggtcctgtgggttttcttggcttcctaatttactcttgcagtcattctggagcaaaaattcatgatgcaggactccacacactactgtccatctgagtggaagctgcaagttagtcctgccctgccatctgccatgatcctctgaaaacaagaatttttcttatatttttccttccacacattgtaatccttattatatgtataatttccatttcttacctgtgttactcctctgaaaaacacagggaatatataaatgaaagttttcttttgagacaaaattttgtgacatgaaaatgcacataacacaataactgatatgaactaggttctgtataattatgaaaaagaagtgttcctttaaatctttaattcaatggaggtaccaagttgatataagatggtcaactaaaatctcttaatgtgggtgcttgctctcttcaggtgcttgaaatcaagtgtgtctccagcatttgttgaagtaaatgaaaatataatgataaataacagaaaaagtcatcccccaccacatgccaattacagtttgtgacaaggagattatctccatgctcaatctcaaggccattctgcctcttctcactggatgatattcctattcccaccagaggatattacagggaaacatgacattagtgccactattaccatggaaactgacacccaacattctcccttcagatttgtccccacctaaaaaagagatttttgtatgtcaacggtgcatcctgagaccctgaaatttcactcactctagagattttttatactttttgggcttttctacatacatcattttattggttccctattgctgctataacaaattaccataaagtgagtgctttaaaaaaaatcccacaaatttggctgagtgtggtggctcgtgcctgtaaccccagcactttgggaggctgaagcaggagaatcatttgagctcaggccttcaagaccagcctgggcaacatagcaagacctcatctctactaaaaattataaaattagctgactgtagtagtacatgcctgatgtctcagctattcaggtggctgaggtgggaggatcgcttgagcaagggagatggaggctgcagtgagctatgattgcaccattgtactccagactgggtgacagagcaagatcctgtctcacacacagacgtacaatttattgtcttatagttctggatgtcagaagcctaatatagatctgcaatgctgtgattgttcttcaatcttgaggaaagaatttgttttctaacccttccttggttgcagagactgcatctctccttgccacatggtccacttcctccaccttcaatgtcagttgcagatcatcttatatctttatctctgtcctgatgttttcaccatatcaccaactactaagtgactctaactccacctgcatctttcttatactgacccttgtgatgatatcacctttataagaaaaaccaggacaaaatgtcatctcaagatccttaactagatgacatttgtgaaccctcttttgacacataaagtaacccagatcatgttgatcaggacatggacatcatttgggagaacattattcatcctattataactaatatattctgttaatggctatactattttatcctcctttctggtctcttacatttgtttttatttctttatttcactgggtacaatttctaatggtatggcaaaaagagtggacatacttgtttcattctcaacctctgtgttgaagcattcagttttgttttttgtttttctttttgttttaacactaacagtgacattttccctaaggtatgtaggtgttcttcaggaagatgaaaaagttttgctctattatcagttttgaaagtcagaccatagacaagtgttgaattttgttgtgtttttttctgcctctattgatagagtcctatgattttttaaatctttttatcatgttaatatcgtggattacattgatcaaattttatttttttcttctcataacgcagtgtagtagacagaacactgattgaattttaaatgattaaacagccttccatcctcaaataaaccccattaaatcatggagtacaaatctttttatatattgttgatttctattgctaatattttcttaagaattttgcgatttttttcatgtgaaatttagtttttagacttttttttttttctaattcctttgcctagttttggcaaaccataataatggtttcataaattaagttgggaagtagtccctcctcttctgccttctgggacaaattgtatataattgctgttaatacttctttacaggtttaatagaattgtttagggttaggctgagatgggaggatttcttaaggctaggagtttgagactagtctgagcaacatagcgtgacctcatctctaaaaagaaaaattttttggccaggcgcagtggctcacacctgtaatcccagcactttggaaggccgaggtgggctgatcacttgaggtcaggatttgaaaccagcctggtcaacatggtgaaaccccatctctactaaaaatacaaaacaattagcctgtaatcccagctacttgggaggctgaggcaggagaagtgcttgaacctaggagttggaggttgcagtgagccaagatcacaccactgcactccagcctgggcaatagagcaagactccgtctcaaaaaaaaaaaattattttttaaaattagcccggcatggtgttccatctacttgtgaatgtgaggctgagttgagtagacttattaagcccagcagtttgaggatacagtgagctatgattgtgccactgagctccaacctggatgacagagtgagacctcatctctacaaaaataaaaacaattgtctagtgttaccatctgtgcctgaaaattgcattatttgggcattatttgggagaatgttttatataatcaggtaagaacacaacgtgagctctagtctcttaactttttaagtgtacaattcagtagtgttattcaaccttaaaatcattcttttaacattttcaatggtatttatttatatggtacatgtgatattttgatacacacataaaatagataatgatcaaatcaggataatttaaatatccatcacctcaaacatttatttctttctcttgacgacctttcaactcttctagctactttgaaatatacaataaattattgttcactatagtcaccctactatgttactggagatgacaacttattccttctggttttttttggtacccattaacctacttcttttcatgcctgtgctaacctccccactctctggtaatgagcattctactctctacctccatgagattaacttttttagctcccacatacgagtgagagtatgagataattgtcttttctgtacgtggtttattttatttaacataatgacctccactttgacccatgttgctgccgcaaatgacaagattttattctttttaaaggatgaacagtataccattgtctatatatacattttctttatccatttgttcgtgatgaaaatgtaagttgatcccatatcttggctattgagaacagtgctacagtaaacatgggtgtgcagatatcactttgatatccggatttccatcctcattctctctctctctctctctctctttctctctttccaacagtggaattgctggatcatatggtagttctgtttgtagtttattgaagaacatccatactattttccataatggctatactaatttgcattctcaccaaccagtgtactagcattttcttcctttgcatattcaccagcatttgttatttttttttgtatttttgatgatagccattctaactgagatgacattatatctcactgtggttttgatttgcatttacctgatgattagtgatgttgagcattttttcataggcctgttggtcgtttgtatgtctccttttgagaaatgtcttttcagatagttggtccattttttaattggctttaaaaatttgtttgtggccaggtgtggtggctcacacctgtaatcccagcactttgggaggctgaagcaggtggatcacgaggtcaggagttgaagcctagcctggccaaggtggtgaaacgctgtctctactaaaaatacaaaagttagccaggcgtggtggtgtgtgcttgtaatcccagctacttgggaggctgaggcatgagaattgcttgaacccgggaaggcagacgttgcagtgagccaagatcgcaccactgcactccggcctgggctacagagtgagactccgtctaaaaaaaaaaattgctatcgtgatgtttgagtttcttatatattcaacttattaattccttgtcaaaaggatagactgtaaatattttctctaattctgtcacttgtctcttcactatgttgactgtttcctgtgctgtgcagaatctttttagtttaatataatccaatttgtctatttttgcccttgttgcctgtgtttttgaggtcttacctaaaaaatctttgcccagatcaatgccctgaagagttttcctattgttttcttatagttttatagtttcagatcttccatttatgtcaaaccattctgattttatttttgtgtatggtgagaaataggggtctagttttatttttctgcatatggggatccagttttccagcaccatttattgaagactgtcttttttcccaatgtatattctttgtcaaaaatcagctggctgcaaagatgtgggtttctttgttctctattctgttctgttgctctatgtgtctatttttatcccagtagcaagctgttttggataccattactttctagtatattttgaagtcaggtagtgtaatacccctcagtttggttctttttgctcagaattgctttggcttttttggatcttccgtagttccctatgaattttaggagttttttttttttttgtttttgtttttgttttttttttttagacaaggtctctattgcccaggttggagtgcagtagtgcgatttcagctcactgcaacctctgcctcccaggctcaagcgattcacctgcctcagtctcctgagtagctaggaccacaggtgcatgccaccgcacctggctaatttttgtattttttgtagggatgggttttgccatgttgcccaggttggtctcaaattcctgagctcaggtgatccgcccatcttggcctcccaaagtgctggaattacaggcacaagccacctcacccagccgtaggattcatttttttctatttctgtgaataatgtcttttgatattttgaaagagaatgtgttgaatatgtacattgcgtttggtagtatgatcatatacacaatattaattttttcccacccataaagatgggtagcctttacttttttgtgtaacctttccacttctttcatcactgtttataattttctacccatagatttttcacttctggcctgggacgcgcgcgtcttcagggtggaagcctggcgcgcgtccggaggtgctgaggagccaaccggcccaaactttgtgggaaatgactcccctctgccctcgcccctcgctctgctaccatttccttccgtttctgcttcgcttggcgatgcaaaacgcgcgaggctcacggcagagggccgaggccacgggactctcagggccgggcccgcccctcggccgcgcagtgcggcgccgcacgccccggacgctgtccagcgttggccgcctgagcagaggctgccgcggagctaagacacccgccgtttcacccagccagcgggcccagcccgcggaggagggcggcatgcagctccgcgttgcctggctctccgggcacgcgggctacgatctgtacagtgcctgtgattacacaccaccacctatggagaaggctcttgtgaaaacggacattcagacagcgcttccttctggatgttatggagagtagctccaaggtctggcttggctgcaaaacactttgttgatgtaggagctggtatcacagatgaagattatagaggaaatgttggtgttgtactctttaatttttgcaaagaaaagtttgaagtcaaaaaaaggtgatcgaattgcacagctcatttgtgaacggattttttaatccagaaatagaagaagttcaagctttggatgacaccaaaaggggatcaggaggttttggctctaccggaaagaattaaaatttatgccaagaacagaaaacgagaagtcatacctttttcttaaaaacaaagagtttttgcttaaagtgttttggtgttttacacttctgtaaacttactagctttaccttctaaaagtactgcattttttttttatgatcaaagaagagatcatttaaaaaaagcatttctttgtgtttggatcacaaagaaactttgtttttctgcagttgatggttatttgtaaatctactttgtggtgacctgatgtaaacagtgtcttcttaaatgtacatcaattacagattaaaaaaaaaatcctgtattatttaactcaagaaatgataccccttcagcaacttaaaaaaaaaagtttgtttttgttttgtgcgtgtgtgtgttttcttttttttgttttgtttttttggagacggaatttcactcttgttgcccaggctggatggcaatggcccgatctctgctcaccgcaccttccaactcctgggttcaagcaattctcctgcctcagcctcccgagtaactgggattacaggcatgcgccaccacgcccggctaattttgtatttttagaagacacaggatttctccatgttggtcaggctggtctccaactcccaacctcaggtgatccgcccgcctcggcctcgcaaagtgctgggattacaggcgtgagccaacgtgcctggccctgtgtgttttataagagagactgggactcactctgttgcccaggctagtcttgaacatttagcctcaagtgatcctcccatctcagcctcccaaagtgctaggattagaaacatgagccaacacacccagccaaaaatcgtcttttctatttacattcagagtgcgtgtaaatttgaaattcactctacgtatcgaaattattgacattatgatgtcaataaagtttatcgcagagacgtttgaggttaattcatctgaagtttggaatagagtaacaggtataagggagagctatttatatctattgtttaaaagtttaagagtcatttatatctatcatctaaaagttttagctttcctttttaaaagcaacatttggtgacctaacttatccctggcgttaaccctccatgcccaaggcgttgtccctgggaaattgtcaggagctgagcacagggttgatcctcaccctccagagtgtagggggaatagaaaaggagaggatttctactctgttctgtgggacgacagcatcaaattgcatgttccgcccaggcagggctttgcatttcatattctagttcgcttcctctcccagacaattccagggcttttaaattaaaatactaaaattaactttaattgcaggaactatcttaggtccaatcactgtcccctactttgaccctctcatagagatcccaggtcccagactgcttggctgctggtcaccgatagggtctttcctcaaaaacctggagaacagacgcgcccagagacaggccgaaggcagcgcagaccccgcccctcaccgccccaccctctcttctctcgggtctcgcccatccctggcctcagctgcgcgcggtttcctggaaacccggaagtgaatcatggggcgtgaactcgcaagcgcagtttcctgaagacccggaagccgatcgcgtggggagccggtcttggagcagcgggtgagtttccctttgtctagattagatccgcttccagcgcttctgtacctggtgttggcggaggggttcttacggatcttaaaatcctcccgccgttccctccatcctaggtatattaatacgtcgccaagaaattcggaggttaaaatcgcttggaggctgctggtcctttccctgagctctctgccttcgggccacgtagacgcttttcgtcccgtttacctgcttaaaaccctttactgaccactccttcggtcccgcgtcatgtaaaagccctcacccatgaggtgtattcacgcccagtgggtcctccaagcctcgcccttctggcctcttggagctcggtcccgcagtctcgatgcatcagcgccgtgtcctctgcccggccctgggattttggaaaccccacccctctcctaatccacccccaaccttgtcctccttgggctgggcccttgtgttccccaggtttccccttcacaacccacattccttaccccgcattgagggaggtgacggggcctggcttttgacactcagtgtttttccgttccaaattgcacccgctggaaaatgtgctcttccagaggaaaaacgattgatttattctttcctcctctgaaactcaacacggtagtaaacactgaacccagaatacttcacttgtggtcaccgaatgtgtggggatttctccccactaacaagcagttctctatcagacatcaactcggtgtcccataatttacctcacttctgacagctgtacctggtgtaagcatcggatcccacagattaaaggctcagtccacaagacttctccacttcagatgtcggttacaagtcccagattggaacctgaacttctaagctactggatataaattgaggattcccatgacccagtcttcagtatttattaatttgccagagtagctcacagaactcagaaacgttttagttgggtttactcatttgttttaaaggatattacaaaggttgcagatagacagatggaatagcagttctagaaaattagttgaatgcaggagaggatttgggaaccgtggtgtttatctggtcagtcagaagtagaggtgaaaactactacttgtgtacagcttctaaggtgaagggtagtcttgtgggactgagcttttcacccatgggatctgacactatctccttgtagatagtgtaagaattgagttaaattttaggattcccaggtggaagtctgcaaggaactggtcagtgtagggaaaccacacattttcttgaccagaagtaaagtatcctgtgttgagcacgagagcaatgaaaacagtttggttttttcctgtctcagtgaagggaagatatttgtaacaggctcacttacctgtctcaagccccgtgctttctactcagtattgactgggaaggatctgtccctgctctttgttttaattttcttgatgtcatcttcatctcttaccgtttttctctgctgatgtgtcctgactcactgttttctgaatgtgggaatgacccacagcttagtcctccaaccacttttcctctctgtccacgtctactgcctttctatctttttttttttttttttttttttgagatggagttttgctcttgttgtccaggctggattgcaatggtgtgatcttggctcaccgcaacctctgcctgccaggttcaaacgattctcctgcctcaacctcccgagtagctgggattataggcatgtgctaccacacccagctacttttgtgtttttagtagagatggattctccatgttggtcaggctggtcttgaactcgtgacctcgtgatccacccacctcggcctcccaaagtgctgggattacaggcgtgagccaccacgcccagccactgcctttctttatcatttcatctcatggttttaaaccctacctttatgtctccatccctcatagacctctctcctaatttctagaattctgtgtccagttgtctcctcaactttcttctgggacatccaacaggcatctccatatttacgtgtccactagtgacttcctgagttctccgatgtatgctcccttgcagtcctacccatctcagataagggtgaccccatacttctgggagcttaggtgaacatattggcatatatttaaaatctaggacatagttccttgtttgaaaatgttttagggaataatataaagaaaaaattacatgattgcttaaaatgggtgaggaactagcatttccaaaattcttttgagttgagggagaaaaatgtttaaaggcctccaccctatctgatctgcacccccaggacctctctgacctcatccgctacctgtgtcggccttgctccctctgctgtagctacacagatctcattccttttcctggagctgaggttgctcctgtctcaggaccttcacctgggctgtccctctgcctaggactctttagcccctcagttgcaggtgacaaacatccttccttttctaggcctgggttctgatatcaccttctcagtgaaggtttatgtgacccttcccctgtcacaacctcacctgctctggcccatattgcctcccctagatgtttctttctgctcttttgctgtccactgtctggatcctggtgacaacaaggacccaaggggagaccagagccagaagataggggttgttctgggcttgctccctctgagtttagctcaaccctggattcgcattagaatgctgagacattttgcaaatatatctcttgtgcctcctttccagagattcccatgcatgtaggttcaagcgcagtgtcccacatgattctaatctgtattcatcattgaacatcagggtgctgtgtcttccatttctgaaagctgatatcggcctgtgatccacagagaggggagaggctgtgctctgcatggggtttggtcagggccagatctgtgccctgaaggggagctcagtccagcccagcaccccacagctgcagcatgtatgtgggcttctccaggtggggagtaagctttgaagaactcaaaaactgacttgttcttcctgtaggactttcttgtctgcatcatccctggtgctgtgggcagcagagggccatctttccacagggcgaggtctttcctgtgtatgtggttgtggcacagggagggggtgtgttgattttgagcagtaaacagcatattttgaacactcaggattaacttgttttttaaaaagttttctttttctttttctttcaggattagcttctaaagtctctttcatctctcctaaggaagaagcctagaagaggaggaagaggaaagaaaaggagtcaggaatgcctcttaggtacagtgatattctcagtggactgttgtgtgtctccttcctttctgaaatgccatgtgtggtgttatgatatatattggtttccatcgacggttcctggcttataacctccatagcccttgttacaatcttttgttgtaatgttggatgtgttaagcctcaggggtaggcctctgaccttcttttgccttcctttcactctgatgctccccagcctttctaattgtgggtcttaagaccctcctccgagagcttcccaccctgtaccctggggggaagaatgttgatgtcatgaaacttccataaaaacccaaaagggcaaagttcgatgagcttctggatggctgaacacgtggaggttcttggaggtagtaagcccaggggcgtcatggaagccctgcactccttcctccataccttgctgtaggtgcctcttcgtctgtatcctttgcagtatcctttataataaactggtaaaggtaagtaagtgcttccctgagttctgtgagccaatctagcaaattaattgaagagggggtcgtgtgaaccccagtttgaagctgggtggtcataagttctgaaggcctggacttgcgactggtgtgtatggaggcaatcttggagactgagccatcaactcgtgggatctgacgtctccagtcttaatgtacacagtagatagtgttggaattaaactggaagatacccagctagtgtctgctgcttggtgtgtggggaaagtacccacatacatttagtcacagaggtcttctatgttgatgattgttgtggtgtgagagtagaggaaaagcacaatttgaggagagcttttccctgtacacatcaggcattggagatgtcagtcttctctgagtctgaagcatgctgcctgtgatgtttgctcacactcacccatgtcttccctcaggccctctgatgtcacttaaattccatctcacagtgactggtgctgtggaatttgtgaagaggctccattgggaagggcttatacccagacatggatggagacggggtgtgggccccatggtgtcactgctcttgggcagcaggaattgaaggattgtttaagggccaggtctggaggcactgccagctctgtagactggattatggaagctgctcgtggaagtcttaatgtgcacaactgcctgataaaatttggaagaagagattaggaagaggaaatcttttctgcctgattttatactccatttgtagtaaatgtttaacagcaagagattctttaaaccattctaagtacatccatcctatggagattgtggtattcctgcagagactcttgtgaaacagatgtttcaggtgaaaatggtaagacttgggtaatacttcttctaggatggggcatttcctattttcttagatctctcaaggttcccctgttatccccagctgcaggggtacctctcctatcaagaacatgtgaaattttgccctcattaaaaaaaaaacaacaacttgctactatgtttatatatatatatattttgaaaatctgggaaaaatgacaaccctctgtattttcatttttcaatttattgtctacataggttttattattttggggacatgtatatacaaaatgaattttcatgctttgctcaattttctttccatgtattttagtatgtgttttaatttctgtggtttttatttctttcatatgccctgatgtcttttatttcaggttatacattttttaattgtaagacaaatctttcatttataccttctgatttttgttgtgcctttgtttgtttcatcttgatttggaaggccttgcatgattatgaagtactaagtttcatttaggaataaagttttgttgtttaaaattttgtttacatttgtgtttaatttgaatttttgcgtatatcataagtatttgatttgttgtaaaattacagatgtttgtcataagaggttcttacatatttggaaaacccctccattttgtttttcttttcaaaattgtgatggttctcctttcacagggcacagtcattaaaaactcatatatttcttttgtgtttgaatggctgtggattcctagtcagagaggtctttgtgtcaccacatctgctaataagaattgggttttccggtccatgatgctctttgttatgtcttttagtaaagtttatttgcctgtttatagttcagtaatgttaagtatgttcacgttactgtgcaacatatctagaagtttttcatctcgcaaaactgaaactgtatacccagaatacactatatcccttctgacctcactatagcctctgtcaacccatctttctatgttgtttatatgcatttgactactttagtatcccacgtgagtggaatcacatagtatttgtccttttgtgactgtcttattttccctagtgtaatgtcctcaaggttcatccgtgttgtagcatatgacaggattttctccttttataaagctgaataatattccattgcatgtgtataacacattttctttatccattcatctgtagataggcatgttggtttttctgtcttcttggctattgtatataatgctgtgatgagcagggatttgcaaatatctctttgagggcctgctttcaagtctttaatgtgtatgtacacacacacacacacacacacacacacacacacacacatatatatactaccatatgatccagcagtctcacttctgggtatgagtgtgtatatgtagatatgtgtgtgtgtgtgtgtgtgtgtgtgtgtgtgtgtgtgtatatatatatatatatattttttttttttttttttttttttgagatggagtcttactctgtcaccaggctggagtgcagtggtgcgatcttggctcactgcaacctctgcctcctaggttcaagtgattctcctgcctcagccttccaagtactacaggtgcgtgccaccatgcccagctaattttgtatttttattagagacggggtttcaccatgttggccaggatggtctcaatctgttgacctcgtgatccacccacctcagcttcccaaagtgctgggattacaggcatagccaccgtgcctggccagatgtatattttcaaatatgtacgtgtgtgtgtatatacacacacaaatatatatacgtgtgtgtatgtatatagatgtataaaatatctacacacacccatgcccagaagtgggattgctggattatatggtagtactgtttttaatattttgaggaacccccttactgacctcagtaatgggtataccattttacattctcaccaactgtccacaaatgttccagtttctcagcatcctctccaacactttttttttttttattgatgatggccatcctaatgggtgtgaggtgatacctcattgtaatgttgattggcatttgtgttatgtttggtggtgatgagcatcttatcatgtgcttgttggccatattgtcatcttctttagaataacatctgttcagttcctttgcccattcattaattgggttatttatttttggtgttgagttgtagaagttacttgataatctattaatgcctatcagatatgtgatttgcaactcttctcccattccgtaggtttgccttttccttcttttgatcgattcctttgaagtgcaaaaactttaagttggatgtagatcctttagtgttttgcttttcttgcgtgtgcttttggtattatatccagtaaatcctttccaaaatcagtgtcgtaaggttttcttctatcctagtttgttacgtgtattaatctggaaatggtgttgaattgttcctaatgctttttttgcatcaattgagatgatggcattgtttttgttctgaattatattaatagtagtgatatagtttttgttggggaccagcctcaacaccacccattttttcttttttaaaaccaccgttgctatcatggcttgttcatggtgtctggtctctctccagaggcatcttccccatctgcagactaaaagcaaacagcataaaccgatacacattaaagtaaaatttgcaatagttgatcctccaacggtccatttaagaggattcacatttgaaagtccatcagcagctccagctaggatgtcaattccaggcaggagagtgaaatgcgcctgagatgcttcaaaaatgtgttcctttcatttggctatatccaatgttaaatttccatcccttccttccagatgatgtctaactttttcccaatgatgttcagtagcattatgtgaatggggatttacgcagaaatcagaagtatttccaatcacattacatttgcaatagatgctctaagctcattatacaatctcccatccatattaacagtctgtctaagatcattgatttgccaattttctttggtctgtttgagtctgagaattccacaattttgaggaattattttgccaattatttacatattctgcagtttgaacagaggaatgtaaagcaattccagcagcactccccttaacatttctgtgatgatatgaatgtaaggagaggcttcccatggtctattgagggaaactggtatccaaactccttctctggcccttaccagcaacacagatgttttcacacaaaacgtggaatcaatacgggtgaaaaggcaacagttttgacatttaataattttagaattaggtcatatatgaatatttctgaccatcaacatgaaaggaggcttgacacaactctgaatggatactgttctgttggaagaaaactgatacacaaattgaagtgtctcaccttctccatcaagatagtattttccttccaaactcgaatatgagattgggccatcattaacttccatagttcagggtgttcagggcctattattggattaattatttttggatgtggtccggctgtaccaaaattggtccaaattatgggaaaatgagcacacttttcagtgtaagtagtgtcatctctttgatagtatagatcctgttttagttttgtctttcatctatcattctgattggtacaattaactgcaaaagtcctcttaggggaccaatcaatgatgattccataggaattattttgcagtagcacaccatgatcagcaatgcaatctttccaaatcaatatttctaaatcctttgaccattgttgagattgttgacacctctcttttctggtcttaaattgttccagttggaccgaactctgtgaatgagccaggctccatccagaaagtaaatgataggatactggtctttgattatgacctgaagtcttaactagccaatgttgttgatagccttttaggcaaccgatagctggccctatgtaaagaggggggactgataacccatggacacatttattaacattccttcctcctctgggtgagagggcccatgagtatctgtaggctcaggcatccaaacactattattaacataaacctcaactgggggttccaacaaagtgacagacctaattaaaggcaggaatgggacatatgcccaataggtataattttggtctgctgtagtcacagggagacttaccgtcatagcaattaccgcaatcatagccacgatgaggttactcgagtttagtggtttttgttgtgccttcaggttttcttctgcaagctgggtcagcctcttgatgtgtcccaagtcagtgggctcacttgacgggttttgtttgtcttcatgtggtcagctgaaatgttcatttgagccatcaaggtgtgcttgggggttgagatcttggttccaaaatccttttctttggaattttgctcatggtagagtttaagatgttttgtaggtacccaaactggaagctggttttctcctggggaaatacaagcaaaccctcttccccatgttataactctccctctttcccaggtctttgttttaaagtccttccaccacacaggttttccttcatgaacatttatcttctgtcttgttaaatgctgctcagctgctgtagtaacctgatcctgggagatgttcaaaaaatttaaggtaacaagagccaattgtaattgcatatgaggggtggaatattccctatctccccctatctcctgtttatgtaattgcatttttaaggttcgattggctcgctcaacaatcacttgcccttgagaattataggggatacttgtactgtgtttaatgctccactacagtagcctgtccattgtctgtttttaatttttttggaattcccatgacagcaaaacaggaaaccaaacgtctttttatatgtgctgcagtctcaccagtttggcaagtagcccatataaaatgagaatatgtatctctggttacatggacataagaaagtttgccaaatgtaggaacgtgggtgatgtccatttgccagatcttgtcaggtgccaacctttgaggcttaacaccagttctttgatgtggtaattgcctggcactgaggtaagtcaaaatttggggcatcagtcagtgagggggaaaccaacaagtcagcttgctgattagccttagtcaagggtcctggaagattggtatgtgctaggacatgagttatatagaaaagaaattcccaggcatgcacaactgcttgtacagagttgaacaattgataaagctgttcatcaataatatatttaattaaggcagttttaatatgcagagtagcttacacaacataagctgaatctgaaacaatattaactggctgattaaaatcttctaatactgtaatcaccacctgtaatttagctgtttgggctgaggaaaagttagtatggataactttatcacaaggtcccacatatgccattttcccagtactgtagccatcagtaaaagtagtcacagcttcttccaaaggggcatcctgagtaatttttggaagaatccatgtagttaattttaagaactggaaagttttatttttaggataatgattatcaatacatccaacaaattccgctaaattaacttgccatgtaactgagttaataaatgcctgtttaatttgatttttattcattggaactataattttattgggctcagtgccacaaagtttaacaattcatataccagcctgtccggttaaaattgccatctgatctaaatatactgtaagtgtttttatggtattatgtggcaaaaaggaccattcaactaaatcatcattttgaataataatcaccattagggagtgcaaagtagggaagacaatgaattgtagaggcaagtctgagtcaatcctaatgacttgggcttgctgaattttttcttcaattactcttaactttttcatggcctcgggtgttagtcctcttttactgtgtaagccggaatctcccctcaatactgagaagagattagacatagcataagtagcaattcctaaggtgggccaagtacaataaatatctcctaacaatttttgaaaatcatttcaaaatgatttttatttcaaaaaggtttttaaagaattttttctaatttgaaccttttgcggcttaatggctctatcctgtacttgcatccccaaatactgaaaaggagtcattgtttgaattttgtcaggtgctataagcaatccagcgtttgtaattgccttttgtaaagatgaataacattgaataagttgttctctattttttgctgcacagagtatgtcatccatgtaatggatgatgtaacaatctggaaattgatctctaacaggctggatacctctgcccacaaaagtttgacaaactgtgtgactgtttaacatatcctgggataaaaccttccaaggatatctggctgcagattctttgttattaacagcaaggatggtaaaggaaattttttcaaaatctgcctctgctaaaggaattgtaaaaaagcagtctttttaaatctataataacaagcagcccgtctttagggatcatggtgggggatgggagcccaggttgtaaagctctcatcggttgaattacagctttgacccctcacaagtcagtcagcatgcgccatctgccggactttgtcttaattacaaatattggggaattccaaggaaagtgggtgaaacatggcctttttctagtagttctttaactatttcatgaaattcccccaactgttccttgcagagcggccactgtttgacccagacagtagtaaactgcagggcgagcctgaattgccccctccccataatgaactgcggggcaggtaataattggcacggagagccgagtctcggtgagccgagtatcgggctccctcccccaccactcactgggttgaggaggtggtggccattctgggcattcctctggagaagccgtgggctgaacaactttctgagtaggtttagggaaactggaggggattggcataaatcacctctggactctccttttggctagtacttggtagaggcggttcagagttctgattatcaaactcctctctctcctcctctgactcagcctcatcgtctgtctgaaaaggctccagtgctgcacgcaccaatgaccaaactgaccaaacaggaaaaggaatttcctttccttctccctttgttcttttaaggtcctttccaactctttcccagtctttcaattccaaagttccctctttaggcaaccaaggacaaaactgttccacagcatgaaacaaatccgtaagattttccttatcaacttttaccccactatgcttcaagcgttgctgtagcaagctcaaatacgtggcgtacttatattcagtttgtcccatttgtgtccctggctttctctgagtgcctcgcttacctgcagagcttaaaaactttttcatcctcaggagtcctccatccgtcggccctccgtttcacacgcttgagcgttcctttaccagattctctcgggccccatggttgggtgccaagctgttggggaccagcctcaacaccacccttagggtactcaaagtccaatggtgacaaaggaatgagaagagacaagttaagagtgcataaaggtgggggccacggggccagattcaaggtaggagcctgcaaaaggccctgatctctggtctccacactattgtgtacaatcacttagatctgagaagcagatgttgaggggtgaaacgatgaaagggaggtgatgtgtcatacacctaatctatagcagtggcggtttaggtaaattttctttgtgctgaagcagcataaactttactactgatttattctttaacttatcagagagcagctgtggggagtgggcttaactaggagccagcaagtctggccacattccattgcttcaaaggagtgtctttctccttgaacacaatgtttacagataagagagcaggtcttgctcagagcatgcgaacattatggcaattaggaggctttcctcctcagaggcctcttgtggctttctgcaacttattgtcccatatttttatggccagtttatacaggcaccccgtaagccctttccccaacagttttctctatgttttttaatgtttataccattttttactagcttaaaatagaaaaatgttgatgaactaaatgttgatgaacagttgatacatttcattgttccatacatgctgaaatggacacaaacaaaaatggcgatttttaagaagttgttgaaaaactcacttgtggacaactgttatataagttaatttaatcgtgtgtatatgtatgtctacatgagtgcatggatgagcaagcccatggctcttatgaaacactcatcataatttaatcaataagttttatatttaacacttgaaattatctctacagtagtttccatggccttaaatttttcctacactgtcacactgagttaaacaatagtaagcatagtgctgtagtatgtgtttgcatgtgtgtatacataatgtgtgcatatataatcaatatataataccctttcatgaagttccatgttgttatccttgaactcatttcacgttttcccaggcaaccctctcttgattaatttttttttttttttgagacagagtctcgctctgttgcccaggctggagtgcagtagaacagttttggctcactgcaacctctgcctcctgggttcaagtgattcttctgcctcagcctcccaaatagctgggattataggtgcatgacaccacacctggttaatttttgtatttttagttgagacggggttttgccatgttggccaggttggtctcgaactcttgacctcaagtgatctgctggcctcagcctcccaaaatgctgactgtgattacaggcatgaaccaccacacctcaatttacttttgtagatcatatctgttagtaacttgttgagcccgggaggtggaggttgtggtgagctgagatcgcaccactgcactccagcctgggcaacaagagcaaagcactatctcaaaaaaaataaaataaaataaaataaataaaaaatttagctgagcgtggtggcacaaacctgtagtcccacctgcttgggaggcggaggtgggaagatcacttgagggcagtcagttgagatggcagtgagcatgatcaaaccactgcattccagcctgtgggaaacagagtgagaccccagctcttaaaaaagaaaaaaaaagaaagaaagaaaacaaactacaaaatgctgacgaaagaaatcaaaggcactcaaatggagacatatacaatgtcaatttattggaagactcagcatagaaacaatgtgaaattaaccaaattgatatacaacattaatacatttcctatcaaggtgttttgtggatactaacaagattatccaaaaaattatgtagaaaggcaaaaaaagatagaatgcctaaaacatctgggaaaaaaaataaaaaggttggaatcatttcatgtgatttcaagtcttctaatatagtataagtatttccttctttttttcatatttacaataaacctagtttatacctgccgtgatcttatgtgcatactcatgcatattttttttctccaaataacagcttcatttatgtgccccctaaacttttcactatagtaacaaagggaagaaatgcatgaaacatagaatgtagactgcaacatatggaaaaggaaactttttaaaattgtgtacaaaaacaaaaaataattttattacaattaaagaaccagagaacattttgcttaataccataatcaaaaatgacatttctgtagcttttggaaaaatgctcttctagtagagtcctatttattatatataacaattagataatgataaattatattatgtaaataaacacttcacaataattttcactgaactgatatgaaaaatatcttaggcaattttactaaacagtatttcacaagcattttcaacagtcatattgtgcaatgggacctatgtgtccagccacaagaggaatgtaataagctattaccatgaagaaaattgaagtctctcctaaccaagtctggagtttcaagagtaaacattcagtgttatcctaaagagttagacttcattttgtgatgtctgagtaatgtgatggttaatattaggtgtcaacttgagtgagttgaaggatatctagatggctgataaagtattgtttctgggtgtgtctgtgagggtgttgccgaggagattgacatttgagtcagtggactaggagaggaagacccaccctcagtgtgagtgggcaccatccgattggctgccagtgtggctagaacaaagcaggtggaagaaggtgggataaccttgcttgctgagtcttctggttctctttcttcttcccatgctggatgcttgtttatgcttctcctgcccttggacatcagattataggttcttcagcctttggactctgggacttgaaccagcagcttcctgggatatctcgagcctttggtcacagactgaaggttgcatcattggcttccttggttttgaggttttcagacttggactgagccactaccagcttctctcttctccagcttgcatacagcctatcatgggacctttgccttgtaattgtgtgaaccaattctccctaataaactcccttttatatatacatgtatcccatttgttctgtacctatagagaaccctgactaatacagactttggtacctggagtggtttttttttgtttttttttttttgacagggtctcactcttttgcccaggctggagtgcagtggtgcaatcttggctcactgcaacctccacctctgaggttcaagccatcctcctgcctcagctccccaggcagctgggactacaggtgtgcaccaccatacctggctaatttttgcattttttgtatgatgtggttttgccatgcttcccaggctgatctcgaactcccgagctcaagtaatccacctgccttggcctcccaaagtactgggaatacaggtgtgagccactgtgtccagcctagaggaacaaaattttaaggatgaatttccttagttggtttaggggcttctggagttggctctctaatcttattacaactaaaaatgctaaggtctctacttctaatagtacagagaacactgatagtccttggtatgcattgttcagagacttgtgcaaaataaatgtatttgatactcatgattcagtgctcctgagaggcaaggagtttagtgactttatacatgatacttttcaacatttctggagaaccaaagaacataatgaagttgctttcctaagttccctggtaaaaaatgatgaaagaaatggataagctcagagatgatacctcccagatctagaatatatcatacttagcctcaaagcttctaagggtaccctgggtgcgactgttttgtagacaaaaggctgaaattgccaaaaatcagacacaagctcttatgtgagtggatgacctacaataattggtgcacactcagcctcaccaggtatctataaagtaagggcattgattgggaaagattgggagcatgtaacttgacatggggatgtgtgggaggatcctgatgaagctgggaacactgagctcttaaaccctgatgagccctttttgcgagagaaaatggcctccctacccctcatggtggcaacatcttcttccccaccaaggctgctttcagcctttgtaccttttttctgaggacattcaccatgcattgcctgaggaaacaacaatggcctcctctgaggcagatgcgaggcaaggcaatgctgattcttctcaggatcctcccccaccacccttctttgcctctagacctgtaactagactcaagtcccagtggctgctagaggtgatgtgacccgtgaggaggtgcgctgcactccaaaagaactgctgaggcataattatgacattattgtctatatttggagattatgatttaaggagatgtgtatgggtgccaagttgatgaggggtagacttgtggttaatcttggttgtcagtttgattggattgagggatgcctagatggttcataaagtattgtttctggatatgtcagtgagtgtattgctaaaggagattgacattggagtcagtaaactgggagaggaaggcccaccctcagtgtgggtgggcaccatccagttgactgccagacggctagaacaaaacaggcaaaaggtagaataaattgacttgctgggtcttctggctctttcttctttctatgctggacgcttgcttacactcctcctgcccttggaaatcagactccaggttctttggccttcggactctgaggcttgcactagtggcttcccaagggcttccaggcttttagccatagactgaaagcctaatatggattggatctatgtccctatccaaaactcatgttgaactgtaatccccagtgctgaaagtggggcctggtgggaggtgatttgatcatggagggcatttcatgtggtttgacaccatcttcctctttgtgctaccattgcaatagtgagttcttgtgagatctggttgtttaaacatgtgtggcacctacccccacccacttcctcctgttctggccatgtgaagtgcctgctcttacttcaccttccttcatgattttaagtttcctaaggcctccctagaagtcagagagatgctggcattatgcttccggcacaccctgcagaactgtgagccaattaaacctcttttctttataaattacccagtgttagatatttctttatagcaatgtgagaatggactaatacaaggctgtaatactgttggcttccctggttcagagacttttggattttaactgagcgactaccagcttttctcttccctggtttgcagagagcctattgtggaacttaactttacaattgtatgagccggttctccctaataaactcccttttatatatacacagatcctattagttctgtttctctgtagaaccctaatacaattactaacacattttacacctctgcactccctctttgtattctgcccatcttgtcaagctgataataaagcctgagtgccccctccttttgcaccagctggaagttcaaaccacaagtgggtactccaaccccagccctatcctttaacaatcatggtaccccaagccagtcatctattccagttctctgaagctgcatttgaaccagctagagaagtctaccctgctttctccataaagcctcattatgtaataaacattttcaggccatttgagtgtatggcatcatcattatcaatatccaaaccaaacctcaggtagactttagacaagttccagtacagtgggcaaaagttaaaattaccaaaaaaaaggtatgaaggtgaatatatgaaatttctagtcagtctgccaaaagaaaacaatactcattttgtgtgttcattcttgagaaaatgtatgaagattagtattttcagattaatgtcactaatacgaaaaagacattattacagtatttttacccttaacctcatacctttttacatcttatttttcatattactatattggtatacttcatataaatgaaagtgcatgccatgggtcttatttggcatacacacaaaaaggcacatagaaatataataatatggtggccaggcacagtgactcatgcctgtattcccagcactttgggaggctaaggcgggtagatcacctgaggccatgagttcgagaccagcctgcccaacatggtgagaaccctaatggtgcattattattgtctgctataaagtatcttcctgtggtgggataaaacagtgttggtagacataacatgattcattcatacttaagaaaatttaaactttattacataaaacatgagaactatgcacattctaaatcaaagttgcacattatattaccaacagttaaatgtgaattctattcaagaacatgctatattggcagttttcattaaactctctactctgatataactgttctctcttccatttcaaaaataagactatagttcatcaatttttgctaaacaacagctattgctattcagttgaggaggtggccatcatttcccctggatgatttctatggcataatcagtccctaagaacccattactcttttccataaaaatcctattttcctaaggccatggcatgctctattttgaggttatttggtagagcatagaagcactaagccattctgtaaggaaaaggatacattgaacacaataagtataatgactggcatcatagttttacattattctctgctcacctccatgccatgaaaagatttcaaagttcaggctaaagtcataaagagtaaagaagccttttcaaaaaacctcccaaataattttttaaaaaattataagctgaatataactgatcatttccacatgccgttgaacctttggtacacatcatgtcatgaggataaacatattttgttgtataatatttcttcagcatgcaatgtcatacattaatataagagaaccagagactgagttatttcttgcataagtcttctgatgtactctagtaatattccttgagttatagcctcagcatacaaaatctatctgtgaggtattttcaaagatatatcttttgatgtctagtgatgtggcaggcctcgacaaagcctgtgtcttgtacactacatttacatggtttctctttactatggactctgatgttgattaacgctcatgatgaaaagtttgccatactcggtttgtaatgactgtctcatgaattaattatctgatgcggtgtaagttgtgatttgtgactaaagaccttaccacatacatggcatttgtaatgtttctcttcagtatggattctgtgatgatatgcaagatgtgaaatctgagtgaagaccttaccacactcattatatttgtaaggtttctctccagaatggactctgtaataacttgtaaggtggaacttttgtctaaaaacctagtctcactcactacatttttaaggtttctgtgcattatggattattttatgaaaggcaaggcttgaatgcacactaaatgcttagctatattaattacatttgtaagatttctctccagtatgaactatctgatgttttgcaaggtgtgaaatttgattaaaggctctgccacattcgttacatttatgtctctctccagtatgaattctctgatgaattgttaaggagaacttgttcctgaagtccttatcacattccttacatgtataaggtttccttccaatgtggattaacagatgggcagtgaggcttgaatgcccaccaaattctttggcacatttattgcatttgtaaagtttctctcctgtatgaattctccaacattgtgctaggtatgaatagctactatagaccttgccacattcattacatctataaggtttctcttccatatgaattatccagtgttctgtaaagtgtgaattgtgactaaagatcttaccacattcattacttttgtaaggtttctctccagtatgagttctccaatgtcgtgcaaggtgtgcaatttgattgaagaccttgccacattcattacatttgtaaggcctctctccagtatgaattctctgatgattgcttagggataaactatgcctgaagaccttgccacgttcatgacatttgtaaggtttctttccactatgaattagaagatgggcaataaggcctgaatagtcactaaatgctttgccacattcaatatatttgtaacacttctctccagtatgaattcttcgatgtcatacaaggtatgaaagttgactaaaaactttgccacattcattacatttgtaaggcttttctctggtatgaattatccaatgttctataaagtgtgaactgtgagtaaagaccttgtaacattcattacatttgtaaggtttctctccagtaagaaataactcagtctcgggctaaaaactttgccacattcattacatttgtaaggcttctctccagtatgaattatccaatgttctgcaaggtgtgaactctgagtaaagaccttgtaacattcattacatttgtaaggtttctctccagtatgaattctctgatgtcatgcaaggtatgaattattcctgaagactttaccacactcattacatttgtaaggtttctctccagtatgaattctctgatgattgataagggataactcatacctgaagactttgccaaatttttttacatttgtaaggttctctccagtatgaattacaagatgggcagtgaggtctaaccactcgttaaatattttgccacattcattatgtttctgagactttctccagtatgaattcttcgatgttgtgcaaggtttgaattgcaactaaagaacttgccgcattcattacatttgtaaggtttctgtcctgtattcactcactaatactctgtaaggtgtgaattgcgactaaagactttgccacattccatacatttgtaaggtttctctccagtatgaattctcagatgttctgcaagatgtgaattgcgattaaagaccttgcacattcattacgtttgtaagatttctctcctatatgaattctgtgatgttgtacaatgtatgaatttttcctaaagactttaccacactcattacatttgtaaagtttatctggatccaggattatgtcatggttaccaaggcttgaagacactctaaagactttgccatgctcattacattcataagatttttccctaatgtgtgttttctgttcttgtgggagcaatggagaatcaaaaaaatcaccacttacatttattaacgtgagttttcacaccagaagaaattttttctttcttttctttctttcttttttttttttttttgagacagagtctttctctgtcgcccaggctggagtgcagtggagtgcagtgatctctgctcactgcaacctccacctcctgggttcaagcagttctcctgcctcagcctcctgagtagctgagattacaggcgccagccaccacgcccagctaatttttttgtatttttagtagagacggggtttcaccatgttggtcaggctggtctcgaacctctgatctcatgatccacccgcctcggcatctcaaagtgctgggattataggcgtgagccaccgcgcctggctgagtgcagccaattaatatcccctaatagctgttgaaaataatttgaagtctgtaacctgtctttacagagaactactttctgaggctgtacacttctttcagtaacaatagtgcctgcgtaatggtatggggaaattgtaccttttctggagctattttgagattccatttagttaaagcctgctttgttcctcggaataactcatgtgagatttgatctgtaggagcgaccaaaagaatgtcatccatataatgaatgatgtaagcagtaggaaacatattccaaggctcctttcatgcccttcctacaaaatgctgacatagtgtaggactgttaagtatgccttgaggtaaaactttccattgatagcgagaaacaggttctctttgattaatagaaggcacagagaaagcaaattgaggcttatccttcttatgtaagggtatagtaaaaaaaaaaaacaatccttaagatctattactacaagaggccagtatcttggaatggctgctggggctggcagaccttgctgtaatgcacccattggtttaatttgtgcattaacagctctcaaatcatgccacagtcaccatcttccgggcttttttgagataacaaacactggtgaattccagctgacatcactatatgtcctgcatccaattgctcttttactagctgctgaagttgagtttgtttctcctgtgttaggggccattgatcgacccatacaggtgttttgctgagccattctaatggtaaggcagttggcagaggagaaatatcaatgacccccatcagaaatcctgatgtcctagcccttttctatctgtttttccagtttctcatatcgggttaggagttccttgtaggaatttccctaaacttttcccactctgatatcccatattcttcaacattttaaatcctgggttatcaaattttcacttgtaagtctgctatcccatgccgtaagtctcagccccataaattgatagctatatttgcaacatagagctgaaaagtatatgactgtccacccagaccaagacaaagtaaaatctcagcactctgtcaaacactttgaactgctcctactcccactagggatgtggaggttagtctgagaggccatggtaggggccggtccttactggttattactgacacatcagctcctgtgtccattagcccataaaatttcttttctttaatttgtattacacaggtaggtctattagagtttatgggttgggatagatttcccatgtagttgtgctcccaaaccctttgttccctcatttctcttttcatggagaagggtgtaatttgcagagaataagcaacaattgagcaatatattctcctggttcaaaaacctgaagatcttgtgacattaaaactacttgaatttctccttcataattggagtcaactactccagggactacagtgatgcctcacaagttaagatggctcttgcccaaaattagtcccatgtatcctgctggtaaaggtctctaaatgccagggggagctttggtaggtttgtctcctccaactaatataattctttctctggcagggagatcttatcctggacttcctggtgttcctggggtgagggaatcaatgtttcttctgggacccacccctgaagtgtggttgtggtctgaaatatgaatgcccttattgtttgaggggcctgggtccaggcccccttctcatttcctgatgggggtacgattctgatgaaattttgagtggcactgattagcccagtgattttctttgttacagtgaggacagagtcctggcattttttcctggtagtagtggggaaccgcattgtaaggtcctttctctcttgagatctcactgcattcctttttaaaatgtccagttatttccacagttataacattttcccattttagggttttttttttttttccattttagggtttgaccattggctctttttagacttatcaactgccaaattagccatttcttgtgctaacattgtggagcaatgcagctcaattcccacatcttgacaagctctgagaaaatttcccaagtttttgtacatttcacaggtgccagtgcatgtttacaatctgcatttgcattctgaaaagctagggttaaggttaacatttctgcagcagtggtgtgaggaatctgacacttgactgcctcttgagatcctgcaagaaattgtgcataaggttcctgagacccttgcacaatatttaaaaaggattgtactgggactccctcttctgtaattgtggcccaggcatgtttagtggccagtgcacactgctgataagcagcgtctgggagtgccatttgatgttccaggtctgaataagggccatgacctaacagcatatcctctgtagtgtctctgtgtccagcagcacggttctgtctagcttggtctgcacacatttcttgccaatttaaattccatgtcaggtatacactagcagacaaacaagtgcaagccaaatgctttacatcaaagggtagaaggtgcatagcaccaaatacagattctagcaatcctaaagtgaatgggctctgtattccattattaagtacactagctcttaattccttcaacaacttaaactctagtggggtgtgttgatgaataagctgctgtgggctatttgtatcgggccttatggagataggaaaagcacagggtcctaagagctctccagctatggcagcagagcataaaattctctctattggggtttctatttctgctaccgaaggaggcggtacagatgtttctgcaattggagggggcggtacaggccaatttttatactccctctcctgttttttattttcaactggtgctgtgggtgggacaacagattctttcagatttttagactcagaacatgactccttctgtccagcagaataagaaggagataatggcagaaggacagtatgaacaaaactccaagtggagaaaacagatgatcaactttaaggcctgcttgatgagcccattttattttattttattttttatttattttttgagacggagtcttgctctgtctcccaggctggagtgcagtggcatgatctcagctcactgcaacctctgcctcccgggttcaagcaattctcctgcttcagcctcccatgtagctgggactacaggtgccggccaccagtcaaggctaatttttgtatttttagtagagacagggcttcaccatatttttcaggctggtctcgaactcccgacctcaggtgatctgcccgcctcagcctcccaaagtgctgggattacaggcatgagccaccgcgcccggctattgatgagcccattttaatccttctcctgctctgtcccaatttttcaaatcaagagtgcctgtctgtggaaaccatgggttatgcatggtaatctcatgcagaagcttagttaatgtctgacaactaacctgagccacagattgtttaagtaaaacttcaagcaacttcacataaagtttttcttcaataaacaaattgtgccccatgttaacctgattcagaaatttctctttcccaaggccgggcgcagtggctcacgcctgtaatcccagcactttgggaggccgaggcgggcagatcatgaggtcaggagatcaagaccatcctggctaatgcggtgaaaccccatctctactaaaaatagcaaaaattagacgggtgtggtggcgggcgcccgaagtcccacctacttgggaggctgaggcaggagaatggtgagaacctgagagtcagagcttgcagtgagcggagattgtgccattgcactccagcctgggagactgggagacagagcgagactccatctcaaaaaaaaaaaaaaaaaaaaggaaaaaagaaacttctcgttcccagtacttttttgaagcactgaccatagagattccattatggttttgacattttgggaaaccagttttaccattgtgtcagtaaaacagtaagatagtttgagagcatatgatctaaataaagatatttgaagggttagttggaattctaaaagtaggtaatggccaaatagcattctcattccttaccagacaaaaacttctttgtcaaaggaattagaaaatgtgaaaatattttttccagataaagctcatatgccacttccaattgactaatgaaatataatagacagactgaaaaagtggattatgatttttttatctgtattcatttatttatttattgacgcagtctcgctctgtctcccaggctggattgcagtggcacaatcttggctcactgcaagctccgcctcccgggttcatgccattctcctgcctcagcctcccgagtagctgggactacaggtgcctgccaccatgcccggcaaattttttgtatttttagtagagacggggtttcaccgtgttagccaggatggtcttgatctgacctcgtgatccacctgcttcggcctaccaaagtgctgggattacaggcgtgagccaccgtgcccagtcgattatgaatcttaaaatgcttcctgtaaatattatgtagctaaagattgatttccagcatctgacataatggtaggtttcttgttaaccagtttctcttctttctgggtaattgcaagtgaatatgtgcacatactgaccgaaataaaatcagggcctgaacttagttgtttactgaaaattcctgggcaaatagtccataaaagctgtttatctctgaatgcactatggctggttaaatacagagaacatccttcttccagctgtaaaggatgaagcatattaaacattacccaggcagatgaagctaaataaccatacagcagctctgtctgacaatgttgtgctggatattgcagtttacttttcaaggtgcagatgtaaggatttaaaaaaaaaaaaaaatttttggccgggcacagtggctcatgcctataatcccagcactttaagaggccgaggcaggtggatcacaaggtcaggagttcaagacgagcgtggccaagatggtgaaaccccgtctctaccaaaaataacaaaaattagccgggcatggtggcacttgcctataatcccagctactcgggtggctgaggcagagagttgcttgaacctgggaggcagaggttgcaatgagccgtgatcacgccaccgcaccccagtctgggtgacagagtgagactccatctcaaaagataataataataataataataataataataataataataataataatttggcaccaaataaatatgagtagcatcctttggcctatgaaatagagtcaggatttgcagggaattgagtttgagaaatgaatgaataaaggcaccgtggtgcctgaccccctcattcatgtgtgtgactctgagcactcacaggcatgtccagcaactcagcccagggcaggtgggttagcctggggttataccttgaaccttatattactctcagtacctctttagggcactgaccttatatcggctgcggcagactcctcctggtgtccccattcatctgatcaatttcacttcttctgctccagcagaccttcttccttcatgtcctcctatccctgtgtatgggtgccatgttgccgtggaccctgttggactgaacaaaggagaaggaacgcgggaattaaagacaaaagaatatgtttggaagaagtggtcaggggactccttgcttctggtgaacaagggccctgagcatctagcacctttcacattggataagattagttgtgacatgttgacttctgtgtatataatataataattaaaacttgtttcaaattatacatatgagattgagaattttaaacttcctatttataagacatgtacaatctataaatcttggcatcagaggttagcttccacttgtaatccctattcagcccaaggacagtgacttatgcagttgtgtgtcactctcttcccttttcccagagtcgggtaggaaatggggaagtgaagtgggagaaaaaaatcactttctgttattacataatactttaaattaaattaattctttaagacaggcctgctctatctcccaggctggagtgcagtggtgtaacttcctctaactgcagccttgacctgctaggctcaagcaatcctcctacttcagcctcccgagtagctgggaccacaggtgtgaaccaccaagaccagctaggttttgtattctttttgtagaaatggggtttcactatgtttcccaggctggtctcaaaatcctgggctcaaaggatcctcctgccttggcctccaaaattactggtattacagggatgagccaccacatctggcctacatagaacttttttttgagagagagttttgctcttgttgtccaggctggagtgcaatggtatgatctcagctcgccacaacctctgtttcccagcttcaagcaattccactgcctcagcctccggagtagctgggattacaggcatgcaccacaacgcccggctaattttgtgtctttagtagagacggggtttcttcatgttggtctagactggtctctaattcccgacctcaggtgatctccccacctgggcctcccaaagtgctgggattacaggcgtaagccaccacgcccagcccatagtagattttaaaatggacatcaggacgcggtggctcacgccagtaatcctagcactttgggaggccgaggtacgtggatcacgaggtcaggggttcgagaccagcgtggccaacacagtgaaaccccatctctactaaaaaaatacaaaacttagccgggcgtggtggcagacgcctgtaatcccacctactcgggaggctgaggcaggacagttgcttgaacctgggaggcacaggttgcagtgagccaaggttgcgccactgcacaccagcctgggcaacagagctagactgcattgaaaaaaaaattttaaaaaaggaacatcaaagccgggcgtagtggctcatgcctgtaatcccagcacttagggagcaaatcactgaaggtcaggagttcaagaccagcctggcctatatggtaaaaccctgtctctaccaaaagtacaaaaattagcggggtgtggtggtacatgcctctaatttcagctacttcggaggctgaggcaggagaattacttggacctggctgggaggcagaggttgcagtgagccatgatggcactaccacactgcagcctgggtgacagagtgagactctgtctcccaaaaaaaaaaaaaaaaaaatagccaaggatggtggcatgcatctgtagtcccatctacttgggaggctgaggcaggagaatcatgccactacattccagcctgagtgatagagtgtgacttggtctcaaaaaacagaaaaagaaatagcaatcagctctttaatgtctccctttatatgagcagtagtcctggccgtgcgcggtggctcacacttgtaatcccagcactttggaaggctgatgcaggcaaatcacctgaagttggtggttcgagaccagcctgaccaacatggagaaaccctgtctctactaaaactacaaaattagctgggtgtggtggcgcatgcctgtaatcccagcaactcaggaggctgaggcaggagaattgcttgaacccgggaagcaaaggttgtggtgagccaagatcacgccattgcactccagcctcggcaacaagagggaaactccgtctcaaaaaatacgtaaataaataataaaaataaaagcacgagtcctattcacgtgtagtcaacacgcatgaccaaattctctcacaggcaccatctgcaggaacatcctattggacaataagaactctgaacatcccttttggccaatataaacattcagaccagggagcctgcatcaggtttttgatgtttttattgtgcagtttgttttatacaatgttttctgtgatctcagtttataaattttcccagtacacattctatgttttatattttacgcacagttaactaggtaactaagggcaatgcatatatataaaattgctctattgcctggtgttatgtaactgtacttgtgacatcataattgcaccctccgacactgttagtcagttcttattgcttttaatgctgtgtattcacttgaactcatatgaagggggtggcctgcccctccacacttgtgggcgtttctcatcaggtggaacgagagacttgagaaaataaagagacacagagacaaagtatagagaaagaaaagcgggcccagggaaccgacgctcagcatacggaggacccacgctggctccagtctctgagtccccttagtatttattaatcattattgggcgtttctcagagaggggaatgtggcaggacaatagggtaatagtagagaggtcagcaggaaaacttgtgaacaaatgtctctgcatcataaacaaggtaaaggaaaaagtgctgtgcttttgatgtgcatatacataaacacctcaatgccttaaagagcagtattgctgccagcatgtctcacctccagccctaaggcggttttcccctatctcagtagatggtatatacaattgggctttacacccagacattcctttgccagggacgagtgggagacagatgccttcctcttatctcaactgcaaagaggccttccttcctctttcactaatcctcctcagcacagaccctttacgggtgtcgggctaggggatggtcaggtctttcccttcccacgaggccatatttcagaatatcacatgggggagaaactttggacaatacctggctttcctaggcagaggtccctgcagacttccacagtgtattgtgtctctgggtgtcaggcctctgagcccaagctaagccatcgtataccctgtgacctgcacatacacatccagatggccggttcctgccttaactgatgacattccaccacaaaagaagtgaaaatggcctgttcctgccttaactgatgacattgtcttgtgaaattccttctcctggctcatcctggctcaaaagctcccccactgagtaccttgtgacccccactctgcccgccagagaacaacccccctttgactgtaattttcctttacctacccaaatcctataaaacggccccacccctatctcccttcactgactctctttttggactcagcccgcctgcacccaggtgaaataaacagccatgttgctccaacaaagcctgtttggtggtctcttcacaaaatttcatgcgcatccatgtgaagagaccaccaaacagactttgtgtgagcaacatggctgtttatttcacctgggtgcaggcgggctgagtccaaaaagagagtcggactttgaatggaaggcgagtctggtttcctaagcagttcctagcttgacttttcccttttgtgtagtgatctggtggccccaaatttattttcctttcacacagcccaaccctcacaccacctctggtctatcttgcttgttctgtgtgattacttttgtgcttttgtcatccactctggatcctagtaagaacaaggccccaaggggagggcggagccagaacgtggggctgtgctgggctcgccccctctgagtggagctcaaccctggcttcacattagagtgcagagcattttgcaaatagagcttttgtgccgctttagcagggattcttattctgatgggatggaacccaccctcagtaatacctgcagtggcgcaggtgcttgtcatctgtgcgcagcattgagcatcgaagctctgtgtcctccatttctgagggctgagctcagcctgtgatccacagagagttgaggggctgtcctgtagggaaaggaaagagagatcagactgttactgtgtctacgtagaaagaagtagacataagagacttccttttgttctgtactaagaaaaattcttctgccttgagatgctgttaatctgtaaccatacccccaaccctgtgctcccagaaatgtgctgtgttgactcaaggtttaatggatttagggctatgcaggttgtgctttgttaagcaaatgcttgaaggcagtatgcttgttaaaagtcatcaccactccctattctcaagtacccggggacacaaaacactgtggaaggctgcaaggacctctgcctaggaaagccaggtattgtccaaggtttctccccatgtgacagtctgaaatatggcctcgtgggaagggaaagacccgaccatcccccagcccgacacccataaatggtctgtgctgtggaggattagtgaaagaggaaggcctctttgcagttgagataagaggaaggcatctgtctcctgctcatccctgggcaatggaatgtctccatgtaaaacccgattgtatgttctattcactgagataggagaaaacggccttagggctggaggtgagacatgcgggcagcaatactgctctttaaggcattgaggtgtttatgtatatgcacatcaaaggcacagcacttttttctttaccttgtttatgatgcagagacatttgttcacaagttttcctgctgacccttccccactattaccctattgttctgccacatccccctctctgagatggtagagatagtgatcaataaatactgagggaactcagagaccagtgccgtcgtgggtcctccgtatgctgagcgccggtcccctgggcccactgttctttctctatactttgtctctttcttttgtcaagagatggcaaaagtgaaaaacaaaacacagaaaaaagtaagaaagcaggaggacaaaaggaactggagaaatgtagagaaaagctagatatacagagacatgaaggacggcaaggtagggagagtggcagcgaagagggaggctcatcagagtgagggagagagggaaggatttggagccagggcagacagagcagagtggtgcttgtgtcaaggagaacagagggagaaacacagcagggaggacacctggggatctggggtgccacagggtcgggacacgggagtgtatcagggaagagagaatttaacagggagaacagaggaggcacagagatgggagaagaggcagaaatagacagagattgaggatgattgaaatattggggagaaggagcaataagaggttaaataagttgtgaggatggagcagaagaggtggaagagaaggaatagagagggaagaaagggataaacggcagaagaggagaggggcacaaaatgaagagcagaatcccaggaagaaagaaaagaaaacaagagctagagagagaaggggagaatgagagagatatacagaattagggagggaagtgcagtaatgaagacagaggggctgggtgcagtggctcaagtctgtaatctccacacttcaggagaatgaggcaagtggattgcttgagtccaggatttcgagaccagcctgggcaacatagtgagaacaccatctctgccaaaaaaaaaataataataataagtaaataaacctgtactcccagctgctctggtggccaagctgggaggatgacttgagcccaggaggtccaggctgcactgagctgagatcatgccactatactgcagcctggtcaacagggcgagagactttgggtttagatgagtgggtgagttcattggatatgattagttgtgacatgttgacttccatgtatataatctaataactaaaaacttgtttatacacatcagattgagaattttaaaattggtgtctataagacgtacattctataaatcttggcatcagaggttatgttccacttggattccctattcagccagagggaagtgacttattcagttgtgaatcactgtcttcccttttcctaggatgaggagggcaaggggtagtgaagtgggaaaaaagtcaccgtctgttattacataatacttttaattaaataatattttgagacagggtacggctctatcacccaggctggagtgcagtgcgtgatctcctctaactgcagccttgacctcttgggctcaagcgatcctcctacctcagccttctgagtagctgggaccacagccatgagccaccaagcccggctagttttcgtatttttttctttttgtagaaacttggtttcactatgtttcccaggctggtctcaaaatcctgggctgaaaggatcctcctgccttggcctcccaaattactgggattacagattacagggatggcccgtggcatctggcctacatagcccccccccctttttttttttgagagggagttttactcttgttgcccaggctggagtgcgatggcatgatgtcagctcaccacaaactccgcttgtcggcttcaagcaattctactgcctcagcctcagtagctgggattacaggcttgcaccaccccacccagctaattttgtgtttttagtagagacgaggtttcatcatgttggtccaggctggtctctaactcccatcctcaagtgatccgctgcctgggcctcccaaagtgctgggattacaggcatgagccaccatgcccagcccatagtagtttttaaaagggacattaggctgcggtggctcacacctgtaatcccagcactttgggagacagaggtgggtggatcacgaggtcaggagttcgagacaagcctggccaacacagtgaaactcaatctctactaaaaaaataccaaaatttccatcctggctaacacggtgaaacccagtctctactaaaaaatacaaaaaattagccgggcgtggtggcgggctcctgtagtcccagctactcaggaggctgaggcaggagaatggcgtgaacccggtaggcggagcttgcagtgagccgagattgcgccactgcactccagcctgggcgacagagcaagactccatctcaaaacaaacaaacaaaaataccaaaattagccaggcgtggtggcagactcctgtaatcccagctactcgggaggctgaggcaggaaaattgcttgaacccaggaggcagaggttgcagtgagccgagattgcgtcactgcacaccagcctgggtaacagatttagacgccgtctgaaaaaaaaaaaaatgaagaaaaagtaaggaatatcaaagctgggcatggtggctcatgcctgtaatcccagcactttgggagcaaatcactgaaggtcatgagttggagactacctgcctggcctacatggtgaaaccccgtctctaccaaaaatacaaaaattagctggccatgtttacacacgcctctaatttcagctactccagaggctgaggcaggagaattacttggacccggctggaaggcagaggttgcagtgagccacgatcgcaccactgccctccagcctgggtgacagagtgagactccgtctgccccccctaaaaaaagaaaaagtagccgagggtggtggcatgcgtctgtagtcccatctactccggaggctgaggcaggagaatctctttaggcaggagaatcatgccacaatagtgcagcctgagtgacagagcatgacttggtctcaaaaaacaaaaaaagaaatagcaatcaactctttgtctccctttataaaagcagtagtcctggccatgtgctgtggctcacacttgtaacgccagcactttggaaggctgatgcgggcgaatcacctgacgtcgggggttggagatcagcctgaccaatatagagaaacctcgtctctataaaactacaaaattagctgggtgtggtggcgcatgcctgtaatcccagctactctggaggctgaggcaggctaattgcttgaacctgggaggcaaaggttgcggtgagccaaggtcacgccattgcactccagcctgggcaacaagagggatactccgtctcaaaaattaaataaataaataaataataaaaataaaagcactgctcctattcacgtatagtcaacacccatggagaaattcttcttttttttttttctcactgtgttgcccagcctgaagtgtagtggtgcgatcttggctcactgcaagctctgcctcccgggttcacgccattctcctgcctcagcctcccgagtagctgggactacaggcgcccgccaccaatcccggctaatttttttgtacttttagtagagatggggtttcaccttggtagccaggatgatctctatctcctgacctcgtgatctgcccgcctcggcctcccaaagtgctgggattacaggcgtgagccaccacgcccagccacccatgaccaaattctctcacagacaccatctgcagaaacatcctattggacaataagaactctgaacatcccttttggccaatataaacattcagaccagggagcctgcatcaggtttttgatgtttttattgtgcaatttgttttatacaatgttttctgtgatctcagtttataaattttcccagtacacattctatgtcttatattttacgcacagttcactagataactaagggcaatacatatatataaaattgctctattgcctggtgttatgtaactgtacctgtgacatcacaattgcaccctctgacactgttagtcagttcttattccttttaatactgtgtatttacttgaacgcatacatcagaaggtactgatcttaacatgtatttcagttcttacagtgtgtgctgattttaagtagaagttgtggcttttttcttgagagagaattgtttagaattctgcaggctgtataaatgtacttatttgcttgctggttttatcatgggttagaatagtttactgattaatatttaagatttcacatatggcttttcagtatatgatatgtaatggaactgacacactgcactagttaaattcagtaagtccctgttctgcatggatataggtaattttaagacaggtattcagaaaaaaattgtattaacatttttttttttttttgagacggagtcttgctctgtcacccaggctggagtgcagtggcacaatctgggctcactgcaatctccgcctcccaggttcaagggattcttgtgcctcagcctcccgagtagctgggactacaggtgaccgccaccacgcctggctgatttttggaatcttttcttatcttctctgtgctatgattatttgacaatacagaatttccattgattttggttactcttacataagcttcttgtggattatttaccaatatagtatattgtatggtcttttagcatttatttgtatacagtagatattctgtaactatgaagaatatatacttttcttctcattgatgtgacagtgatatgtttttttgcaaactgatagaatttagggtcacagtggaaaaacactcctgactttaggcttacacatgtttgtgccctgtcagagttttgtcatgacattggatacaggcttccatagaaatgatttgaaggacatgtaatcgccctttatttatattaaagaatcttactccttttgtattcctaaactttgaagatcatgtttggaaagtttaaaataagtatttttttgtgtgtcatatttacacatttcagtatgatttaccatctggacttaattggaaacgtattggtgtttatattttgtagatatctcttccaaatgcatgatgaaaaaggtgggaagattacttgagccagggagttgaaggctgcagtgagccctgtttttgccaccacactccagcttgggtgagtgagctacaccctatcgcaaataagtcaataaatgagaggtttaattcctcctttgaaaataaagaaagagattttctttcctttcatcccttttcttaggacatttatttagaaaatatgcaaaaatacgaaagttagctgggcatggtcgtgtgcgcttgtaataccagatactccaaaggctgaggcagaagaatagcttccacccagtaggcagaggctgcagtgagccacgatctcgcaactgcaccccagcatgggccacagagaaatactgtcttaaaaataaaataaaagaaaaaagtaaaaaaagaaaaagtaatagatctctttaacaaacgtactgggacaactaactggatatccacatggaaaagaataatgttggatccctatgttacaccatgaaaaattttatttaaaaacggtaaaacaaacaaaaaacaaggccgtgtggggtggctcacatctgtaagccaagcagtttgggaggctgaggagggcggatcacgaagtcaggagatcgagaccatcctggctaacacggtgaaaccccatctctgctaaaaatacaaaaaattagctgggcttcgtggtggtcgcctcaaatccgttactccaaaggctgaggcaggagaatggcgtgaacccggaagttggagcttgcagttagccaaaaccgtgccactgcactccagcctgggcgacagagagagattctgtctcaaaaaaaaaaaaaaaaaaaaaaaaaaaaaaaaagggagggagagacgaggaagggagccctgtgagagggggtgttactttgtcaccaggctggtctggacccccaggttcagcgattctctggccgctgcttcctgagtagctgggacctcaggcttccgcctcgtgcccgcatccctgctgtgtttaagcagcaggtggtgacctcacttctccctttcctgagcactcagtcccgcatcccaggcggaggccctagggaagtctctgaagctgagcacagggtggactctccctcctgaatgaatggcgaatagaaagagagaggatttctgttctgttctgtgggccatcagcatgaaatcatatgttcctcccaggcagggctttgcatttcacattttagtttgcatgcccgttccagacaattccagggttttgaatcatgcctcaaccttcctggccgctctcccctccaaacacccaaaaaacagaggagctgcctgccaggccaagtgatgcacaggtcccgccccggccccgccctctgccggttctaaagggcaaggtctctccgcctcgcgctccgaccctaccccgcccaggacccgccaaactgttcgcgggccccgcccaggcctggcttctgtcctgcgcgcgcaaaccaggtggcgtatcgcttggagtgaaggtcctaccgcggcatgtgagtttcgctctgtgttgtgttaagtctgcgcttcccaggtccccggcgcttctgtccctaggactttgggtccccacggacctggaaattctcgcttgtcttcattcacatagagcaaattgagatgtccccgtaagagtccgggagttgcttccttttgggtttgaagtcgtccggaggctggtccagtccctggtctttctgctgtagggcagtgtatacacttctatagcgtaattttcctgctcaaaacctttttctgactctcccgccccgtgcttcttaaagtcctcacccgcgaggtggattcccgccctgggcgcctcccaggctcggcccctggagcacagcgccccgggcccagtcctggggaggctgcgtcttctgcctggtcctggaatcctgcaggtgtcacccttgtcttaaggcgccgtcgccccctacgtccctcctcgtgccgggccctgctgctcccgtagtcttccctctgcagtcaccgcttcccctgaaccagcattgggcaggtcccaggggcttgtcctttgacccgggatattcttgcctgcccagttccaccccccggaaaatgcgcttctccgcgatgcaggagtcttactccaaacccgcagagttttgctggtggcaaggagaaccgagggagaaacacagcagggaggacaccgggggatctggggtgctagagagtggggacaggggggtataacagggaagagagaatttaacagggagagcagaggagacgcagagataagaggcggtaatatatagagattgaggacgatcgaaagattggggggaagggcaacaagaggttaaataaggaccgggcgcggtggcttatgcctgtaatcccagcagttttggaggctgaagcgggcagatcacctgaggtcccgagttcgagaccagcctgtccaacatggagaaaccccgtccctactaaaaatgcaaaattagccgggcgcggttgcacatgcctgtaacgccagctattagggaggctgaagctggagaatcgcttgaacctgggaggcggaggttgtggtgagccgagatctcaccatttcactccagcctgggcaacaagagcaaaactccgtccaaaaaaaaaaagtggttaaataagttgtgaggatggagcagaagaggtggaagagaagtaatagagggaagaatggaataaatagcaggagaggagaggggtacaaaatgagcagaatcccagggaaaaagacaagaaaacaagagctagagagaaggggagaatgagagatgtgtaaagaattagggagggaagcacagtaatgaagaaagagtggctgggcgcagtggctcaagcctgtaatcccagcactttaggagactgaggcagagggattgcttgagtccaggagttcaagactagcctaggcaaaatagtgagacccgccatcgctgtcaaaaaaaaaagaaaaaaaaatttaacggggcatgatagtgtagacctgtaatttcagctactctgtaggcagaggctggaggatcacttgagcccaggagctccaggctgctgtgagcagagatcatgccactgtactccagcctggtcaaaagagcaagaccctgtcttaaaagaaaaaaagggttggggactttggatacagatgagtgtgtgagttcattggatatgattagttgtgacatgttgacttctgtctatataatctaataacttgtctaaattatacagatgagtttgagaattttaaaagtcctatctgtgagtcatgtacattctataaatcttggtatcagaggttagcttccacttggaatccctattcagcccgcgggcagtgacattcagttgtgagtcactctcttcccttttcccagggtggggtaggaagtggggcagtgatgtggaaaaaaaaatcactttctgttattatgtaatacttttaattaattaattaatattttgagacagggtctggccctattgcccaggcaggagtacaatggtgttatctactctaactgaagcctcgacctcctaggctcaagcaatcctcctccctcagtctcctgagtagctgagaccactggtgtgagacaccaagcccagctagttgttttttttttctttgtttgtttttttgtagaaacagggtttcagtatgtttcccggggtggtctcaaaatcctgggctcaaaggttcctcctgtcttggccttgcaaagtactgggattacagggatgagccaccgcgcccagcctacatactaattattattagtagtagtagttttttgaggtggagtttcactcctgttgcccaggctggagtgcaagggcacgatcttggctaatgactctctgtgcctttagagttgaagcgattctcctgcgatactaccccctgagtagctgggattacaggcatgcgccaccatgccccgctaattttggattaggaggccgaggcaggagaatcacttgaacccaggaggcagaggttgtggtgagctgagatcgcaccattgtacttcagcgtgggcaataagagcgaatctctgtctcaaaaaaaccaaaaaagaatggagcaaaacaggagaggggtataaaatgagcagaagcccagggggaaatgcagaaaagaaacagatggagagagaaagtgaaaaagggctatgtataaaatgatggagggaagcagtaatgaagatgaagggggaccctgagtgcagatgagcggtgagttgattggatgtgatgatgaagtgatgacacgttgttttctctgtttataatgtaacaaatttaaaattagtttaaattatacagatgagaatgagagttgccaaactcctgtgtctaagtgtggtgcattttataatgatggcgtcagaggcagcttccctctgcaacccctcttcagccagaggacagtgacttgactcattcgttgtggatcaccctcttcccttttcatggctggggtcgggagtgggggaagagaagtagggtaagaagtgactgactctgttactatatggaacgtgatgaaaggagtattaaagtgctttttttctctttttgtaattggtttccttttttctagttcctcctcatttaattagtttagttgtctttttgtttttctttttgagatggagtctctctctgtcacgcaggctggagtggagtggagcgatctggactcactgtaacctctgcctcccgggttcaaggaattctctgcctcagcctcccgagcagctgggattataggcgcccacaaccacacctgtctgatttttgtatttttagtagagacaggattcaccatcttggcaagatggttcttgaactcatgacctcgtgatccaccctcgtcggcctcccaaagtgctgcgattacaggcatgagccaccacgctcggcctcatttgttgttatttatttatttatttatttgagacagagtctcgctctgtcacccaggctggagtgcagtggcgcaatctcggctcactgcaagctccgcctcccgggttcacgccattctcctgcctcagcctcccgagtagctgggactacatgcgcccgccaccgcgcccagctaattttttgtatttttagtagagacggggtgtcaccatgttagccaggatggtctcgatctcctgacctcgtgatccgcccgcctcagcctcccaaagtgctgggattacaggcgtgagccaccgcgctcagcctcattagttgttatttatttatttatttgagacagagtctcgctctgtcacccaggctggagtgcaatggcgcaatctcggtcactgcaaccttcgcctctggggttcatgtgattctcctgcctcagcctcctaagtagttatgattacaggcacgcagcaccatggccggctaattttgtattttcagtagaaatggggtttctccatcttggtcaggctggtcttgaacacctgacctcaggtgatcctcctgcttcagcttcccaaggtgctgggattacaggcatgagccgccgcgcccagcctttaatttttatttttttgagacactcttgctgttgtccaggctggagtgcagtggcaggatcacatctcagtgccgtagcaacctcctgggctcaagtgattttcccacctcagcctccggagtagctggggccacaggcacgccccacgaggcctggctattgtttagatatatatatttatttgttgagactctctgtcacccaggctggagtgcagtggcacgatttcgtctcactgcaacctccgcctcccagggtcaagcgattctcctgcctcagcctcctgagtagctgggattacagacgcccaccaccctcccagctaatgtttgtacttttagtagagacagatttcagcatgttggccaggctggtctcaaactcctgacttcatgatccgcccaccttggcctcccaaagtgcttgtgcaccactatgccctgctaattttagtatttttggtagagacatagtttctccatgttggccaggcaggtctcgaactgctaaccttgtggtggtcttcctgccctggcctcccaaagtgctgggattataggtgtgagtcaccatgcccggccttattgttttcaaagtatgatatattttcaactatttctcctttgagccaagatttcattacatctatattttttgaacattttaaaattgtttctctgtgaaattgtgttcagtttacattgaggtctgtttgctttctagtctttatcatatatcgaaaacattttctactatgtgatatatgatgttaggttgtttcagtgtgtacttgataatgatatcaaggaccttttttctttatcctaacatgaaaatttagttaaagtagcctattccattttcttttcttatgtcatctgaaaaaatggttatctgtgagcttctaagtaagtgtccccctcaagtccctctggtccataatattctctacagatgttgaaggatgggctggattgacttggaaccttggtttagcagagcccatgtgttcatgagaaaagcatttgctcagatctcatttctacagctgcctctttttcagtgttttaaacacctattgctgtgtgtgcacatggtgtgttttgcacatttttctgggagtgagtaatgatatgtttgggattgatgccatcagaaccttacaactcgaaagaagtttcctttgctcaggtatataagatggtcctggaatttttgtttgtttgtttttctttgagatggagtctcgctctgtcgcccaggctggagtgcagtgacatgatctcagctctctgcaacctccacctctcgggttcaagcaattcttttgcctcagcctcccgagtagcagagactacaggtgcccaccaccacgcctggctaatgtgtgttttttttttttttttttttgagatggagtctcactctgtcgcccaggagggagtgcagtggcgcaatctcctctcactgcaagctctgcctccttggttcatgccattctcctgcctcagcctccggagtagctgggactacaggcacccaccaccacacccagagaattttttgcatttttagtagagacgggcattcaccgtgttagccagaatggtaatttgtgtatttttagtagagacgtgatgtcaccatattggccaggatggtcttgaactcctgaccttgtgatttgcccactttggcctgccaaaatgatgggattacaggaatgagccacctcgcctggccgctttttttttttttttttgtaagacagagtgtcaccctatcacccaggctggaatgcagtggaacaatcttggatcactgcaacctctgcctcccgggctcaagtgatcttgcgtcagcctcccaagtagctggaaccacagatgcacgccacgatgcctggctaattttttgtatttttgttagagatggggtttactatgttgcccgtgttggtctcagacttcttggctcaagtgattggcctgcctcaactacccaaagtgttgggatttcaagggtgggtcaccattcctggctggtcttggaattttctagaggaggaagaccaaggcagcctattggccctttcaggccatcacattggaatcagccacacctccttcctcctcacctcagagcttctcaggataacttggtgaaatgtctcccgctgtgagccttagtgagcccacctgtaacatagaggtgaggaataagatcagaaaagctcagtcagtgacactgacccctgaaacgactgacaaaatacagtgtgtgacttttcttctgggagaggataatggtcatttttaactcaaatttcaaatgaattccagttctccaagatgagcaaaaacaggggattagactcaaatcaccttgaaggttatcatctcacagctttcacccacctacacgactccatgtcccctgcaggcctcaaccctgagctctacaatcctgtgtccagtagtctcctcagctctctcctgggacatcaaacaggcatccccaccttcagctgtccataagtgacttcctaaatccccaaacacattcccttgcagtctgcacatctcagatgagagtgaatgtgtacttccgaaaacttagctgaacttgacagcacatattttaaatatgggaaatacattacattatttgtaagtgttgtaatttataatacatagagaaacgtacatgtatatgtgaaaagagtgagaagatacatcacttccaaatcgtttttttttttttgagatgaattttcactcttatggctgaggctggagtgcaatgccatgatatcagctcactgcaacctctgtctcctgggatcaagggattctcctgcctcagactcccgagtagctgggatcacaatcgactttcaaaatgcttttgggttgtgggagaaaaatgtttgaagaccatgtccctatgggtctgtgcccccaggacctctctgacctcatctcctacctgtgccctcctctcttccactgttccagccccacgggccgctttccttttcctggggctgaggttgctcctgtctcagggccttcacttgagctgtccctctctctaggatgctcttcccctcagctgcaagtgacaagcagcctttctttcctaggtccttgttctgatatcatcttctccgggtctcctttgtgatctcccacagccctcattcgacactgcggctgtgaaatcagaaaatcttacagagatctcagttaatttagaaagtttattttgcccaaggtggtcggcgcagagcttaattttatacattttatggagacatgagacatcaatcaatatatgtaagaagtacgttggtttggtctgggaaggtgggagaactttaaacaaaggcaggaagacttgaagcagggaaggggcttttaggtcacagagaactgaggcacaaatggttgcaatcttttgagtttccttttttttttttttttgagatgaagtcccattttgtcacccaggctggagtgcagtggcacgatcttggctcactgcaacctctccctcctgggttcaagtgattctcctccctcagcttcccaagtagatgcccagatcatttttgtatttttagtagagatgtcttttcaccatgttggctgggacggtgtcgacctcttgaccccaagtgatctgccttcctcggcctcccacagtgctgggattacagtcctgagccactatgctgggtctttcttttgagtttgattagcctttcaaaggaggtactcagataggcatgtatgtcagggagcagaggggtgactttgaatagaaggggagtctggttccctaagcagttcccagcttgacttttcccttttgcttagtgattttgggccccaagatttattttcctctggtccacattgactgttttgtgtgactttttttttttttttttttgagatagagtcttgctctgtcacccaggctggagtgcagtggtgggatctcggctcactgcaacctctgtctcctggcttcaagcaattctcctgcctcagcctcctgaatagctgggattatgggcacccgctaccatgcccagctaatttttgtacttttagtagagaaagcatttcgccatgttggccagtctggtcttgaagtcctgaccctgtgatccagccgcctcggcctcccaaagtgctgggattataggcgagagcccctgcgtctggcctctttgtgattatttttgtgcctttgtcatccactgtctggatcctggtgagaacttggccccaagcggagggcagagccagaacgtggggctgtgctgggctcgccccctctgagtggagctcaaccctggcttcacattagagtgcggagcattttgcaaatagagcttttgtgccgctttagcagggattcttattctgacgggatggaacccaccctcagtaatacctgcagtggcgcaggtgcttgtcatctgtgtgcagcattgagcatggaagctctgagtcctgcatttctgagggctgagctcagcctgtgatccacagagaggtgaggggctgtcctctggatgcggtttgatcagggatgggtctgtgccctgaaggagagatcagtccagcccagctccccactgctgcctcgtgtgtggtggctgctccaggaggggggcgagatctgaagaccagggtcaaacatacacttataggtcttcctgtgggactttcttatgtctgcatgatctctggtgcagtgggcagtggggggggcttctttgtacagggtgatgtctccccgttcctgtgtttttatcacaggaagggagtgagtcatatctaacctgaagtcttatttttcttccacatacaggattgatttctaaagactcatgttacatgaggaagcagctcagaagaggaaaggaaaggagccaggcatggctcttcctcaggtgaagtgatattcctctgtggattaatctgtctctttcctttctgaagtgtagtagtattatattgtattgtagtaatgtattgtaacagccagtcttttctgagtctgaagcattttgcctgacacgtttgcttgcactcacccatgcctgccctcagttcctctcatttgctcaaaagaattccatctcctgtgacccagtgacatgaacttgggaagaggctccactgggcatggtcctgggaagggctcacacccagacatggattaacatggggtgtgggcccgttgatgtcattgctgctgggcagcctggattgttcaggggccatatctggatgtcagctctttgtggaccagattagagaaactgcatatgaaatacgtatgttaatgtgcccaggtatgtggcaaattctgggaaaggagacgaataaggagaggtattttgtatctcatttggtaatgcatttgaagccacactagtagatcaagatgtctctgtctccaaactttttgttttgttttaagagacaggatgttggtccaggtgggatggctcacacttgtaatcacagcactttgggaggccaaggcaggaagatcacttgaggtcaggagttcaagaccagcctggccaacatggtgaaaccccatctctactaaaaatacaaaaattagctgtgtgtggcggtgcatgcctgtaatctcagctacttaggagacggaggcaggagaatcgcttgagcccaggaggtggaggttaccatacactgaaattttgccactgcactccagcctgggaaacggagcaagactctgtctcaaaagaaaaagagagggagagagaaggtgtcgctctgtggcttagttctggagtacaatggcacaattcagagtttacagcagcctcaaactcctgggctcaactaatccctcctttagactcccaaagagcctgagtgataggcatgggtcaccatatgtatgtatgtattttaagatggagtctcgctcagtcaccaaagctggagtgcaatgtcaggatctcagctcactgcatcctctccctctgggtttcaagcaattcttctgcctcagcctcctgagttgctgggactacaggatgcaccaccacacccagctagtttttgtacttttagttgggacagggtttcattatgttctttaggctggtctcaaactcctgaccttgtgatctgcctgtcttggactccccaggtgctgggattaaaggtgtgcaccaccatgtctggccttattttttatattgtatttttattttgttgtccaggctggagtgcagtaatgcaatcatagcttgctacagccttgatatcctggcctccagtgatcctcccctcttggcctcccaaattgctggcattccaaatgggagacagccagcccggctggactctgcactttttttgagatggagtctctctctgttgcccaggttgtattgcagtggcgggatctcagctcactgcaacctctgccttccggcttcaagcaattcttttgcctcaacctctggagtatctgggattacaggcattcgctgtcacgcctggctaagttttttgtatttttatagagatatggtttcagcatgttcccaggctggtcttgaattcctgacctcgtgatccactcacctcggtctcccaagtgctgggattacaggcatgagccactgagactgaccaatcatgatagtttttagattcggacttttctttgaaagccatttgactttgtcctctctgaaacaccacttgtatcttagctcatctagagactaaatatcagctcgtatgttgaacataatatctgacatgtctgtagagaaaaccctgtgtttgcttttttttttttttttgagatggagtcttgctctgttgccaggctaaagtgcagtggtgcaatctcagctcactgcaacctccgcctcccggattcaagcgatcctcctgcctcagcctcttgagtagctgggagtacaggtccacaccacgacacccagctaatttttgtatttttattagagacatggttttgccatgttggccaggatggtctcgatttcttgaccacattatctgcccacattggtctcccaaaatgttgggattacaggtgagagccaccgcctggcattgctttttttttttaacatggagtgtcagtctgttgcccaggatggagggcagtggtgcgatcttggctcactgcggcctccatctcctgacttcaagtgattctcctgcctcagcctcctgtgtagctgggattacaggagcctgccacaatgcccgtctaatttttatatttttagtggagacaggtttccaccacattggccagggtggtctcgaactcttgaactcaaataatctgcccaccttggcctcccgaagcattggtattacaagcgtgaaccaccatgcccagccctgtgtttcctttttatttatatagtttttatattgtccataaaatcgagacttccatagcgacttatgggatcttaaaatctttcaaggaaaagtacaataaaatgcaactattgagaaaaaaaattcaaaaataccttaacgtggttttgtcacaacacagtctttgatcaaagaaatacttattttctcttttctcatttcctgtgaaggtgataactcaatcctccataatgttttgttgaaatgtgtgtttcattttagggacgcttgactttcagggatgtggctatagaattctcattggcagagtggaaattcctgaaccctgcgcagagggctttgtacagggaagtgatgttggagaactacaggaacctggaggctgtgggtgaggaaaatgtccctgcagacatgaggagtctgctcttgtctgtcttggctcttcctggttttgtattctcttttgtgattttgccccatacgtggtttttttgtttgattgtttgtttggtttgagatggatctttgctcttgtttcccaggctggagagcaatggtatatcggctcatcataacctccaccttccgggttcaagtgattctcctgcctcagcctcccgaggggctgggattataggcatgcgccaccacgcccagctaactttgtatttttagtagagatggggtttctccatgttggtcaggctcgtctctaactcccgacctcaggtgatccgcccaccttggcctcccaaagtgctgggattacaggcgtgagccaccatgcccagctcattctggtttttgaggagcatcacagaagcgtctctcactggcactgtgacaatgttcatcccataaactaatgatcatcttctctaagcagcagtcagtggtgttgaaatttctcctagcggggacatcatttgggctcacagcctcatatgtatgaggctgttgactgaactcttgttcatttcacatttttcacaccaatatatgtcattgttcattttttgtttgtttgtttgttttttgtttttgtttttgagacagtctcgctctttcacccaggccgactgcagtggcacgatctcggctcactgtaagctccgcctcccgggttcaagccattcttctgcctcagcctcctgagtagctgggattacaggtgcccgccaccatgcccagctagtttttttttgtatttttagtagagacggggtttcaccgtgttagccaagatgctctcgatctcctgaccttgtgatccactctcctcgacctcccaaagtgctgggattacaggcgtgagccactgcgcctggcccattgttcatttttgacaagaaaacctatgttcagtttgttgtagggtcaaccctgtaagagatatggttttcatcaatcttatttagggagcttgtgaggttgaatgaggtttccatggtttagttctactgtcatttccttcagacacagtggctttcaacttgttagtttctatgttgtttttttttttgagtcagagtctcactctgtttccctggcttgagtgcagtggcttgatcttggctcactgcaccctccacctattggattcaagtgattctcctgcctcagcctcttgagtggctgggattacaggcatgtgtcaccacaacctagtaatttttggtagttctattacagatggcagtttcaccatgttggctaggcttcttttgatagcctggcctgacgtgattcacttgcctcggattccaaactgctgggattacagtcatgagccaccacccctggccccatccgagtttgtttttaaggctgaataatactccattttatgtgtataccacattttcctcatgtatttatctgtcgatggatatctgggttggttttttctctttactattatgaacaatactaccaggctgggtgcggtggcccatgcctgtaatcccagcactttggaaggctgaggtgggtgaatcacctgaggtcaggagttcgagaccagcctggccaacatggtgaaaccacatctctattaaaagtacagtttctttttttttttttttttttttttaagatggagtattgctctgtcacccaggctggagtgcagtggtgcaatttcagcttagtgcaacctccacctcccaggtcaggcaatctcctacctcagccttctgagtagctgaaattacagatgttcaccaccatgcccggctaatacttgtttgtatttttttagtggagacagtgtttcaccatactgtcctggctggtcttgaactgctgatctcttgatccacctgcccattatgcctggcgcaagcctggctaatttttgtatttttagtagaggtggagtttctacttgtgattcatccacctgctttttaaaacaagtgaatattattagatggcttcatatattataagttttacaggacagactctaaacttcctttgtttaataagatttgtcggcctttggtgatgttgatgatgagatgccccttttcctatctcactcatttcatcgttctgttagaaatagcttagactggccagccgcagtggcttatgcctctatttccagcactttgaaaggctgaggtgggtagatggcttgaggtcaggagtttgagaccagtcgggcaaacataatgaaaccttgaatctactaaattaaaaaaaactggatggtcgtgatggctcacgcctataatcccaatattttgggaggccgagatgggtggatcacttgaggtcagaagttcgagaccagcctggccaacatggtgaaaccccatatctagtaaaaacacaaaaattagctgggcatgttggtatgcacctgtaatcccagcttcttgagaggctgagatgggagaatcacttgaacctgggaggtggatggtgcagtgagccatgatcacgccactgcactccagcctgtatgacagagttagattccgtttgccacaaaacaaaacaaaaaaattagccaggcatggtggcatgtgtctgtagtcccagctactcacgaggctgaggcacgagactctctttaggtaggagaatcgtgccactgcactccagcctgggtgatgaagcatgactcagtctcaaaaacagacaaaaaaagaaatagctggaactggaaagcttaagacatagaaatttatttctcattaatctggaaagtgggaaatccaagagcaagatgtcagctagattggctcctggtgagagccttcttcgtggtttagcccagccgtcttcctgctgtgtcctgacatgggggaaagaggagcaggcaatgagctctttactgtctctttttataaatcactagtcctggctggacgagctggctcatgagtgtaatcccagcactttgggaggctgagacagccaaatcacatgaggtcgggagtttgagaccagcctgaccaacatggagaaaccacatctctactaaaactacaaaattagccgggagtggtggcacatgcctgtaatcccagctactcgggtggctgagacaggagactcacttgaatctgggaggcggaggttatggtgagccgagatcataccattgctctccagcctgggcaacaacagtgaaactctgaatcaaaaataaataaagaggcggggcacggtggctcatgcctgtaatcccagcactttgggaggccgcgcagtgcagatcacgaagtcaaaagatcgagaccatcctggccaacatggtgaaaccccattgctactaataatataaaaattttctgtgcgtggtggtgcatgcctatagtcccagctacttgggaggctgaggcaggagaatcacttgaacccgggaggcaaagttgcagtgagccgagactgtaccactgcactccagcctgggtgacagagcaagactccatcacaaaagaaatagagagagagagaaagagaaagtgaaagagagaaaaagaaagaaagatattaaaagccttagtcctattcacaattagtcaacacccatgaccaaattctctaaaaggccccatctgcaggaacatcctattggtcctattggtccactatcagatgatagtggaccgagcgcggtggctctcgcctgtaatcctagcactttgggaggccgaggtgggtggatcacctgaggctaggagttcaagaccaacttaaccaacaggagaaaccccatctctactaaaaatacaaaattatcgagtgtggtggtgaatgcctgtaatcccagctactgaggaggctgaggcaggagaattgcttcaacccaggaggcataggttgtggtgagctgatattgcatcattgcactgcagcctgggcaacaagagtggaactctgtctcaaaaaaaaaaaaaaagaaatctgataatcgcttttagccagtacgaacataactgtagttgtgacctcataattgcacttttctacactattagtcaattttttttttttttttttttttttttgagatggagtcctgccctgtcacccaggctggagtgcaatggcacgatctcggctcactgcaacctccggctcctgggttcaaaagattcttttgcctcagcctccaaagtagctgagataacaggcacccgccaccacacccggctgatgttttggtgttcttagtagagatgcagtttccccatgttggccagcctgttctcgaactcctgacctcgtgctccacttgcctcagcctcccaaggtgctgggattacaggttgtgagtcgtcgtgcccagccgttagtcagttcttattccttataatgctgtgtattttcttgacctcatacatcagaaggtagtgatcttaacatgtatttcagttcttatattgtgtgctggtggttaagtagatgttgtggcttttttcttaagagggaattgtttagaattctgcaggctgtataaatgtacttatttgcttgctggttttatcatgggttacaatattttattaattaatttttataattttgcatatggcttttcagtatgtggtatgcaatataactgacacactccactcgttaatgtcaaaagtgccaccaggtgcagtggctcacaccggcaatcccagaaatttgggaggccaaagggggtggagaccagcctggccaacatggtgaaacccggtctctaccaaaaacacacaaactagccagtcatagtggtgtgtgcctgtaatcccaggtacttaagaggctgaggcaggagaatcacttcaacccagcaggcagaggttgcagtgagctgagatggcaccatggcacttcaagctggaatgcaagactgtctcaaaaaaataaaactacaaaaaatggtttcaaaagtcactatgtgcctgttctgtgtggatatatgtaattttatgacatttattgagaaaagtattgtattaactttttttttcttttttttccttttttttttctgtttgaggcatagtctcactttgttgcccagtgtggagtgcagtggtgacatcttggctcactgcaacctctgcctccccggttcaagtgattcttgtgcctcagcctcctgagtaactgtgactacaggcacgggccagcacacctggctaatttttgtaatcttttcttatcttctcagtgctataattgtttgataatacagaatttccattgcttttggttatccttacatgagcttgttgtggattatttaccaatatagtatattgtgtggtgttttttttttgcatttatttgtacacagtaaatatggtttaaatatgaagagtatatatttttctcttccttgatgtgacagtgatatgttttttgcaaactgtgatacactgtagggtcacagtggaaaaatactccttactttaggcttacacatgtttgtgccctgtcagtgttttgtcatgatataggaaataagcttttatagacttgatttgaaggacatgtaattgtctgttatttattaaagaatcttactacttttgtgttcgtaaactttgaagatcatgtttgggaagtttaaaataagtattttttattgtgtcatatttacacacttcagtatgatttaccatctgcacttaattgcaaacgtattggtgtttatattttgtagatatctcttccaaacgcatgatgaaggaggtcttgtcaacagggcaaggcaatacagaagtgatccacacagggatgttgcaaagacatgaaagttatcacactggagatttttgcttccaggaaattgaaaaagatattcatgactttgagtttcagtcacaaaaagatgaaagaaatggccatgaagcatccatgccaaaaatcaaagagttgatgggtagcacagaccgacatgatcaaaggcatgctggaaacaagcctattaaagatcagcttggattaagctttcatttgcatcttcctgaactccacatatttcagcccgaagagaaaattgctaatcaagtggagaagtctgtcaacgatgcttcctcaatttcaacatcccaaagaatttcttgtaggcctgaaacacatactcctaataactatgggaataattttttccattcatcattactcacacaaaaacaggaagtacacatgagagaaaaatctttccaatgtaatgagactggcgaagcctttaattgtagctcatttgtaaggaaacatcagataatccatttaggagaaaaacaatataaatttgatatatgtggcaaagtctttaatgagaagcgataccttgcacgccatcgtagatgtcacactagtgagaaaccttacaagtgtaatgaatgtggaaagtccttcagttacaagtcatccctgacatgccatcgtagatgtcacactggtgagaaaccttacaagtgtaatgaatgtggaaagtccttcagttacaagtcatcccttacatgccatcataggtgtcacactggtgagaaaccttacaagtgtaatgaatgtggaaagtccttcagttacaagtcatcccttagatgccatcgtagacttcatactggaataaaaccttacaagtgtaatgagtgtggcaagatgtttggtcaaaattcaacccttgtaattcataaggcaattcatactggagagaaaccttacaagtgtaatgaatgtggcaaggcttttaatcaacaatcacacctttcacgtcatcatagacttcatactggagagaaaccttacaagtgtaatgactgtggtaaggcttttattcatcagtcaagccttgcacgtcatcatagacttcatactggagagaaatcttacaaatgtgaagaatgtgacagagttttcagtcagaaatcaaaccttgagagacacaagataattcatactggagagaaaccttacaagtgtaatgagtgtcacaagaccttcagtcacaggtcatctcttccatgccatcgtagacttcatagtggtgagaaaccttacaagtgtaatgaatgtgggaagacttttaatgtacagtcacacctttcacgtcatcatagacttcatactggagagaaaccttacaaatgtaaggtttgtgacaaggctttcatgtgccattcttatctggcaaaccatactagaattcatagcggagagaaaccttacaagtgtaatgagtgtggtaaggctcacaatcacttgattgattcatcaatcaagccttgcatgtcatcatagacttcatactggagagaaaccttacaaatgtgaagcatgtgacaaagttttcagtcacagatcacgccttaaaagacataggagaattcatactggagagaaaccttacaagtgtaatgagtgtggcaaagcctttagtgaccagtcaacacttaccatcaggccattcatggtgtagggaaacttgactaatgtaatgattgtcacaaagtcttcagtaacgctacaacgattgcaaatcattggagaatccataatgaagagagatcttccgagtgtaataaatgtggcaaatttttcagacatcgttcataccttgcagttcatcagtgaactcatactggagagaaaccttacaaatgtcatgactgtggcaaggtcttcagtcaagcttcatcctatgcaaaacataggagaattcatgcaggagagaaatgtcacaagtgtgatgagtgttgcaaagcctttacttcatgttcacacctcattagacatcagagaatccctactggagagaaatcttacaaatgtcatcagtgtggcaaggtcttcagtccgaggtcactccttgcagaacatcagaaaattcatttttgagataactgttcccaatgcagtgagtatagcaaaccatcaagcattaattgacattggagtcaattcagcattgacttgagtttgtgttgacttaacattgagttcaagccttaattgacatgcaggtgtttatgataagaggattgggccaggtgcagtggatcacgcctgtaatcccagcacattgggaggccaaggcacataggtcacttgaggtcaagagtttgaaacaagcatggccaagagatgtgagccagttttcccagcctgtttattattattttttgagatggagtgttgctcttgctgcccaggctagagtgcaatggtgcgatcttgactcacagcaacctccgcctcctgggttcaagcgattcctctgcctcagcctccctagttgctgggattacaggtatatgccacgacgcctggctaattttttgtatttttagtagggaaagggtttctccatgttggtcaggctggtctcaaactcccgatctcaggtgatccgcccacctcagcctcccaaagtgatgagattacaggcatatgccaccgcgcctggcattgtttcttcttttccttttttttttttttttttttttttgagatagtactttttaaagagatagtacttttttgagatagtacttttttaaagggatataccatagtagttttaaaagggatatcaggctgggtgtggcagctcacgccggtaatcccagcactttgggaggccaaggcaggcagataacaaagtcaggagattgagaccgtcctggctaacacggtgaaacctcgtctctactaaaaatacaaaaacttagccgggcatggtggtgggcacctgtagtctcagctactcagggggctgaggctggacaatggtgtgaacccaggaggcggtgcttgcagggagccgagatcgtgccactgcactccaggctgggcgacagagtgagagtctgtctcaaaaaaaaaaaaaaaaagatatcaaacccggggtgtctcatcccacagcactttggaagactgaagtgagtggatcatctaagatcagagttcaagagcaccctggctaacatggtgaaaccccatctctactaaaaatacaaaagttagccaggggtgggggtgtgcacctttagttccagctacttgggacactgaggcatgagaatcacttaaacctgggaggtagaggttacagcgaatcaaaaccgtgccactgtactgcagcgaggttggcagagtgagtctccatctcaaacaaacaaatgaaaaaaacagacatcaaaaatgcttttgttctcgttgtgtcatagacttcccttttttttccttctggttcctcttcagttctctatttattttttcttttttgcagattgagtttgagatatatcttagttttaatagttttatttcttaacacataatgacttctgaaagatgcctttgcagcatcctgtaatcagctcacatcattcgtttctgtacttgtatattttccagttgttttccggttgaccccaaaattcgtgagatttttttcctacaacaatttcaaaagagttgctgtttgaaattagttgcatccagttcagatcgaggtctgcatgctttctagtctttgttatttattggaaggctgtggtacctactacttaagtttgattgttgcagtgtgtacttggtaaagatgtcagtgaccttttaaataaacatcaaaatgtagtttaagcagttagtctgtttttcagttttctttccttatgtcattttttaaaatcttgagctgggagctatttattgtgtgtttccctcaaggccctgtggtccattctggaaaaatgttgaaacatgggctggagtggcatagagcgctgctccaaaagcacccatgtattcttttcttttttggaaatggagtctcgctctgtcagcttggatggagtgcagtggtgcgatctcagctcactgcaacctctacctccttggatcaagtgatgctcctgcctcagtctcctgaggagctggaattacaggcacccaccagcacacccagctagtttttgtatttttagtagagacagggtttcaccatgtttgtcaggctggtctcaaactcctgacctcgcgatccacccgactcagcctcccactgtgatgggattacaggcatgagctaccacgtcgagactcttttttttttttttttttagatggagttttgcttttgttgctgaggctggagtgcaatggtgcgatctggtgtcactccaatgtcttcctcctgggttcaagtgatttctcctgcctcatcctactgagtagttgggattacaggtgccctccaccactcccggctcattttttgcatttttagtagagacagggtttcatcatgttggcaggctggtcttgaactcctgacttcaggtgatctgcccacctcgacctcccaaaatgctaggattacaagcgtgagccattgtgcctgaccactcatgtattcttgattgaaataatttgcttatttcttagttctacagctgaccctctttcactgtttccaaggtcaatagctgtgtgttcacacttctgcattttataaatgttcctgtgagttttttgtaaggaagaattaactgtcaggaatcaatgtcatcagaaccttgcaaaagaagtttctttagcccaggtttgtgaaagaggtttctctaattttcaaggatgggggtgataagagcaacctttgccattagcccttccaggaccccatgtaagactttagacaccttctcactcatctcagaccttctcagggtaacttggtgaaaatgtcttccgatctgagccccagtgagcctccctgcaacttggcgacgaggggcttgaccagaaaaggtcaacccgagtgtccctgaccgttgaaatgattggcaaaatggagtgcgtgtctgggtgtggcttttttttttttgaggagtgcccagttgtgattagaattttcaatgggatgcagtgccctaaaaatgaaaaacaaaagcagaagaatggaagaaatagaggtagactcagacacagagaccatcttcaaggcctttctctgtatgaggacatcacagcaaaatctaaagcaggtcacgtcaatccctggcagggaaccctccaccggcttcccgtgttccccaggacaaaagcccaacccctcactgtggctccacagccccgtgtgcagggcccctgccagtgtccagcctcctcctggcagcttgccctcatctcatgactccctctgccccagtcacatttgcttttctcttttcccaaacatcaaaacccttcctgtctcaggtcattgtccctgctcttaccctatgtaccctgtccctttctcctccttcaggtctaggctcagagctctctcccatgccctcccacccctggtctcaagctcctgagctcaagtgatctacccacctcggcctcctagagtgctgggatgacaggcatgagccactgcaaccagcctctgcatggggtttcctcaactttaggtctgtgccctgaaggggagctcattccagcccagttcccaactgctgcagcatgtgtgtgtgggcttctccagaaggggagccagagtttccctgtaggagtttatcctccatggtgaggagggccgcaggggggactgtatttgctcagggtgaggtctcctttgtgtcaggcctctgagcccaagctaagccatcgtatcccctgtcacctgcacgtatacatccagatggcctgaagcaactgaagatccacgaaagaagtgaaaatacccttaagtgatgacattccaccattgtgatttatttctgcaccatcttgactgatcaatgtgctttgtaatctcccccacccttcagaaggctctttgtaatcctccccacccttgagaatggacttggtgagatccaccccctgcctgcaaagcattgcccctaactccaccgcctgtcccaaaagctacaagaactaatgataatcccaccatactttgctgactctcttttcacactcagcccgcctgcacccaggtgaaataaacagcctcgttgctcacacaaagcctgtttagtggtctcttcacacggacgagtgtgacactgtatgtgtggttgtgttccagggagggggtgtgtggattctgagcaataaacagcatttttaacattcatgattgacttctaaagactgttggtacgtgaggaagaaacctggaagaggaagaggaaagcaaaggagtcaggaatggctcttcctcaggtgagatgatattctcggtggattgttctgtctccttcctctcagaaaccctgggccttggagttgggaatcttctctgggtctcaagtgtcctgcctgacaggtttgctcacacccatgtcttccttcagtccctctcatctcacttagattccatctcttgtaacccagtgacatgaatttgggaagaggctgcactgggcatggtcctgggaagggctcacacccagacatggatggagacagggtgagggtcctgtggtgtcagtgctgttgggcagcggggattgttcaggggccacatctggatgctctgtcagctttctgtggaccaggattagagcagctgccaatgggagtcgcgtatgaatgtgcacaaagtacgtgtaaattctagaaaacgaaaccaaaaacagaaaatcttttttccccctgattttatactacatttttaggtaatggattgagttcgtgtttctgactccaaaaatcgtactaattagaatggaaagttcatacagacatgaatgatagaaggtgttttattccatcattagtttaagaataggaaatcaacctgaataatagcaggagattcattcaaccactcttaacacattaagttcatggagactggggttactgtggagaggcttgtgaaacaggtgtttttggtaaaaatggttacaatttattttttgagatggagtcagcctctgccacccaagctggagtgcagtgacatgatctcagtttactgcaacctccgtctcctgggttcaagtgattctcctgcctcagcctcccaagtagctggggttataggcatgttccaccacggccatctaattttttgtatttttagtagagatggggtttcatcatgttggccagggtggcctcaaactcctcacctcaggttatccgcccacctcaggctcccagagtgttgggattacagacactagccactgtgctgggtccttttgagtttctgattagcgttgccaaaggaggcactcagatatgcatgtatgtcagggagcagagcggtgactttgaatagaaggtgagtctggtttcctaagcagttcctagcttgattttaccttttgcttagtgatttggggctccatattcattttcctttcacacagcccaaccctcacaccacctgtggtctatcttgcctgttctgtgtgattactgttgtgcctttgtcatccactgtctggatcctagtgagaacaaggccccaaggggagggcagagccaaaacatggggctgtgctgggctcgccccgtctgagtggagctcaaccctggcttcacattagagtgcagagcattttgcaaatagagcttttgtgctgctttagcagggattcttattctgacgggatggaacccaccctcagtaatacctgcagtggcccaggtgcttgtcatctgtgtgcagcattgagcatcgaagctctgtatcctccatttctgagtgctgagctcagcctgtgatccagagaggtgaggggttgtcctctggatgcggtttgattagggatgggtctgtgccctgaaggggagatcagtccagcccagctccccactgctgcctagtgtgtgggggcttttctaggaggggagtgagatctgaagaccagggtcagatatacacttgtaggtcttcctgtggtagtttcttatctctgcatgatctctggtgcagtgggcagcagaggaccgtctttctacagggtgaggtctcccctgtctgtttttgccccaggaagggagtgagtcatttctaacatgaaagctcgtctttttttttttttttttgtggggaaaagaaagatcagaatgttactgtgtctttgtagaaaagggagacataagaaactccattttgatctgttctaggaaaaattcttctgctttgagatgctattaatctgtaactttagccccaaccctgtgctcacagaaacatgtgctgtattgaatcaaggtttaatggatttagggctgtgcagggtgtgccttgttaacaatatgtttgcaggcagtatgcttggtaaaagtcatgccattctccattctcagttaaccagggacacaatgcactgcggaaagccgcagggacctctgccctagaaagcctgggtattgtccaagtttccccccactgagacagcctgagatatgtccttgtgggaatggaaagaccttacatccccgcgcctgacacctgtaaagggcctgtgctgaggaggagtagtgaaagagggaggcctctttgcagttgagataaaaggaaggcttctgtctcctgctcatccctgggaatggaatgcctcggtgtaaagccgaccattggttctattctgcgataggagaaacctgccctgtggctggaggtgagatattctggcagcaatactgctctgtgactctttgctacactgaaatgtttgtgtaaagtgaaacataaatctggcctacatgcacatccagtgaagggcgccagcccctccacacctgtgagtatttctcatcaggtgggatgagagactgagaaaagaaataagacacagagacaaagtatagagaaagaacagtgggcccaggggaccggcgctcagcatacggaggacccacatcggcgccagcctctgagttacctcagtatttattgatcattatttttactatcttagcgaggggagtgtagcagggcaacaggtagggagaaggtcagcagggaaacaagtgagcaaaagaatctgtatcatgaataagttcaaggaaaggtactgtgcctggatgtgcacataggctagatttacgtttctcttcacccaaacatctcaatgtagcagagtaacagagcagtattgcctccagcatatcttacctccacctaccgggtggttttctcctgtctcagaatggaaccaatgggaatggtcagctttacagggagacattccattcccagggatgagcaggagacagaagccttcctcttatctcgactgcaaagaggcctccctcttttactactcctcctcagcacagaccgtttactggtgtccgggtgggggatggtaaggtctttcctttcccatgaggccatatctcaggttgtctcagtgggtcccccttggacactgtccaaggtattgtccaccttgcacaatacccaggctttcttgagcagagctccctgctgctttctgcagtgcattgtgtccctggttaattgagattggagaatggcgatgacttttaccaagcatactgcctgcaaacatatgttaacaaggcacatcctggccgagcatggtgactcaaacctgtaatcccagctctttgggaggctgaggcaggcagatcacaatgtcaggagtttgagaccagtctgaccaacatggtgaaaccccgtttctactaaaattacaaaaattagctgggcgtggtggcgggcgcctgtaattccagcgactcgtgagtctgaggcaggagaatcgcttgaacctgggtggcagaggttgcagtgagccgagatcatgccactgcactaagcctccataacaaaatgatactccccctcggaaaaaaaacaaaacaaaaaacaaaacaaggcacatcctgcacagccctaaatccattaaatgttgattcattacagcacatgtttctgtagcacagggttggggctatagtttacaggttaacagcatctgaaagcagaaacaattttccttagtacagatcaaaatggagtttcttacgtcttccttttctacatagacacagtaacaatctgatctctctttcttttccccacaatccaggcatggtacatttccttaaatttattaatgatacagattcctttgcttatatgtttccctgctgacattctcctcaccatcaccctgttgccctgccgcactccccttgcgaaaatagtaaaaacagtgatcaataaataccgagggaactcagagatcagcgccagtgcaggtcctcgcatgctaagtgtgctggtcccctgggcccactgttttttctctatagttcgtctctctgtcttatttcttttctcagtctctcatctccacctgatgacaaatatccgcaggtgtggaggggcaggcccccttcatttttcacatacaggattgatttctaaagactcgtgttacatgaggaagcagctcagaatgttgtaagagagcgagttagagaaacaccatacttagagacgaattcaggcgtccttttttagctggtgaccaagagatggcttcacgctcaaaattctctcagccctgaagaaggggctagattttcttttataccttggtctaagaaggggaggggatagcctagccgaagcaattttacagaaacagaataggcaaaaagtaaaaaattaatggttacagagatagttacagaaaaacaaacagttccaggcacaggggcttgaactatcactaagagataaatgcagcggcttttaggtaccttccaccgagcacattcccaggggctgcttgtacagcctgcctgaatatcttatcagcaggtgcattcctggatgtgcttggagtcagcttgcactatttattcccttaaggcggataaagggcactgcaagtgaagaagctaaaatggagtctgtccggctctctctctaggagagtcacttaggttaaaacgaggtagggtagccgggcgctgtggctcatgcctataatcccagcactttgggaggccgaggcgggcggatcacgaggtcaggagatcgagtccatcctggctagcatggtgaaaccccgtctgtactaaatatatataaaaaattagctgggcgtggtggtgggcgcttgttgtcccagctactcgggaggctgaggcaggagaatggcgtgaacccaggagacggagcttgcagtgagcggagatcgggccactgcactccagcctgggcgacagagagagactccgtctcaaaaacaaacaaagaaacaaacaaacaaacaaggtagggtatcacaagaagaggaaagaaaaggagccagggctggctcttcctcaggtgaagtgatacttctcggtggattaatctgtctctttcctttttgaaatgccaggtattgtagtagccagtctttcctgagtctgaagcgtcctgcctgacaggctcactcgcactcacccatgccttttctcagttcctctcatctgctctgagattccatctcctgtgacccagtgacaagagcttcttaagaagctccactgggcatggtcctgggaggggctcacacccagacatggatggacacggggtgtgggccccttggtgtcagtgctgctggacagcctggatggttcaggggccacatctggatgtcagctctttgtggaccagatcagagaaacaacatatgaaatacatgttaatgtgcacagatatctggtaaattctgaaaaaggagaccaataaagggagatagtttgtatctgacttggtaatgcatttgaaatcactttgggggcggggcctggttagacggtgggggccgggcctggggtggggcaagagggaggaggctgcttggaggtcgctctggacagcgggacggggcggggccagaggtttatcctcgtttgggggcgggacctgagatggggtgttgttcttaagggcggggcctggctgcgatgggtcgggggctctctcctcagctgggcccatgatgtgacctgctgtcatcctcttgacctccaggactggatccccggggttctgattggtggattgtttctggtgtgccgtgatattacccctaatatcacagggatgcttcctgccctttttaagttagcatttcaaacaatcgaaggtaaaacaacatattgtagtgggccaactgtactgaacgctgaatcgttttttctctgaagttgaaaacggttttaatgtaaagcgccttttttgagcaggtagagtcgcgcatcctgcaggcggggcgagctcccctcaggctggggcaggacgggggacaggggcaggtacctcggtaaaggggtggagtggggcgctgcttacaaaggggactgacaattagaatggcttagtaaactaagcaaggtcctgggttgtttgagtggataatggaaatagaaaggtgacatggaaaactgcctattatacacctattataaaggtggaggaaattttcatatttcatggaaataaagccagaactcggagcggtggatcacatctgtcatcccagcactttcagaggccgaggtgggaggattgcttgaacccaggagtgtgtgatcagccagggcataatagtgagacctcgtctctactaaaaataaaaaaaaaatcagccagatgtggtggtgcacacctgtgttctcagctgctcggggcgctgagatgaaaacatcacttgaggccgggcgcagtggctcacgcctgtaatcccagcactttgggaggctgagacgggcagatcacctgaggtcgggagttcgagaccagccttaccaacaaggagaaactccgtctctactaaaaacacaaaaaaattagctgagcatggtggcccatgcttgcaatcccacctactcgggaggctgaggcaggagaatcgctcgaacccgggaggcggaggttttggtgagccgagatcccgccactgcactcaagcctgggcgacagagcgagactccgtctcaaaaaaaaaaaaaaaaaaaaaaaaaaaaaaaaaaaaaagaaaacatcacttgagccagggagttggacgctgcactgagccctgatcttgccagcacactccaacttggatgacagagctagaccccgtctcaaacaagcaagcaaataagtgagaggcgtaattcctccttcaaaaataaaggaagagattttctttcatgtagtctcttttcttaggatatttatttagaaaatgtgtaaatgaattttctctgtcttctgaagcggtatgttatttgagacagagtttcgcgcttgtagcccacgctggagtggaatggcgtgatctccgttcactgcagcctccatctcccgggttcaagccattctcctgcctctgcctcccgagtagctgggattgcacgcatgtgccgccacgcccggttaatttcgtatttttagtagagaagggtttttccgtgttggtcagactggtctcaaactcctgacctcaggcgatccgcccgcctctgcctcccaaagtgctgggattacaggtgtgagccgctgcactcgaccagaagtggaatttttttagaaaagaactaaactgttttttagcttaatgacccagggatgtatttccgaaggacttgggagctctctttgaaaggcaaccaacaacagagatagcacttgtgtctcagtaggaaattaaattattcaaacatcaagtgattccaatttaaagcaatggatatttaaataattctgagccttgagaggaatgtggtcatgcaaccagagtccagtggaatgcaggcgcaacttctaagagttttcctgtaaataatttggaaaactggccatgcacagtggctcacgcctgtcatctcagcactttgggagactgaggctggcagatcacgaggtcaggagacagagatcatactggccaacatggtgaaaccccgtccctaataaaaatacaaaaattagctgggcatgttggtgcatgcctctagtaccgtctattctggaggctgagccatgagcatagggagtcggaggttgcagtgagccgagattgcgccactgtactccatcctggcgacagagcgattctccatctcaaaataaatacataaatagcaataaaaataaaaaaaataattaggaagactaagcagccccagcgatatgacctcctcagagcattgtgccttcttacgcagtgataaagtaaccttccttgaagtgtatcaatccatcaccaatcaacttgctgcaacctatgcactggtcttgaatggaaaacgtggtgattctgctaaagcatctctgtctttccctgtgtgtgaaaccttaacgtctctactttggaacgctgatcccatttatttggagttgatgtttccaggtggctttcttcaagctttgtgttcacattaactctgtacttaatcatatattttaaattttattatttactgctgacatcaatttctgtcgtatggtaggcgcctgaccagagagggcacctgtcgccatgttgtaaaactcaaacttgccaaaaagacatgggttagggtttcttcccctccctcgggatgaagctagttagctgacacagatggtcacctccattaccaagtagagccaggatgaactatgtgcgaccaagggtgttgtcaagtcctcttccctgaggactgattagtgtttatcttgaaaatatgtccttaatgggttgtatagaacagtgaagtttctttctctcttttcaacctcttagctgtttgcctctatttcccatcacattctggtcaaggcttattgatttatttatttagagacggaatctcttctgtcgcccaggctagagtgcaatggtgcgatctcggctcattgcaagctccgccttctgggttcacgccattcttctgcctcagcctctccgagtagctgggactacaggcgctgggcaccacgcccggctgattttttttttttgttttttttgagaccgagtcttgctctgtcacccaggctggagtgcagtggtgctatcttggctcactgccagctccgcctcctgggttcacgccattctcctgcctcagcctccccagcagctgggacacaggtgcacgccaccacacctggctaatttttttgtatttttagtagagacggggtttcaccatgttagccaggatgacctcgatctcctgacctcgtgatccgcctgcttcagcctcccaaagtgctgggattacaagcgtgagcccccatgcccggtcctaaggtttatttattaacaaaatggtttttatttctttctctgttatcgtcgtggagatgatttctcatttgggataatattttttagttttcaattatattttgtcaacatttaaaaagcaaagtaaagaatatttcttgggccaggcatgttggctgacgcatgtaatcccagcattttgggaggctgacacaggcaaataacttaaagtgaggagttcgataccggccaggtcaccgtagtgataccccgtctctatgaaaaatacaaaaattaaccgggcatcgtggcacgcgcctgtaatgccagctgctcccgaggctgaggcaggagaatcgcttgaacccaggaggcagaggctgcattgagttgagatctcgccactgcactccagcctgggcaacagaaatactgtgtctcaataatagtaataataataataataataataaagtaatagatctcttccacaaatgtgctgggacaactaactggatatccacatggaaaagagtaatgttggatccctatgtcacaccatcaaaaattttatttaaaaaagttttttttttttttttaaaaagggaaaaggcccgggcgcggtggctcacgcctgtaatcccagcactttgggaggccgacgtgggcggatcacctgaggtcgggagttcagcctggctaacatggtgaaaccctgtctctactaaatatacaaaattaactgggcatggtggcgcatgcctgtagtcccagctactcgggaggctgaggccggagtatcgcttgaaaccaggaggcggaagttctagtgagctgggatcactccacggcactccagcctgggcgacggagtgagactctgtctccaaaaaaaaaaaaagggaaagagagagagagagactaggaagggagacctgccgcagtgggtgttactttgtcgcccaggctggcttgggaccccaggctcagcaattctctccgttgcttcctgagtagctgggacctgaggctcccgcccccgcgcctctgctgtgtttaagcagcaggtggtgacctcactccttcctggcctaagcactccgtcccgcacccctggcggtggctttaaggaagtctctgaagctgagctcagggtggactctccctccctagtgaatggagatagaaagggagaggacatctattctgttccgtgggccgtcaccatgacatcgtacatgccgcccaggcagggctttgcatttcacattctagtttgcatcccggttccagacaattccagggctttggaatcatgcctcagactttctggcgctctcgcctccacaacctaaaaacagagacgctaggagagaggctgaaagacgcgcaagtcccgccccggccccgccccggccccgccctctgccggttctaaagggcaaggtctcagcgcctcgcgccccgccgctacctcgcccaggccccgcccacctcctcccacctcccgcccaggcctggcttccgtcctgcgcgcggagattaacgcaaacccggaagcggatcgggtggagtgaaggtcacgtcgccatggtgagttttgctctgtgttgcattaagtctccgcttcccaggtccccgccgcttctgtccctgggacgtggggtccccacagacctggaaattctcgcccgtcttccttcgcccagagcaaattgagacagcccagtgagaggccgggtgtcgcttcctttcgggtttaaagtcgtctggaggctggtcccgtcccgggtctgtctgctatagggcaatgtatacactttctattgcgtagtttttctgctcaaaaccttcttctgactcttccctcctcgcgctatttaaagtcttcacccacgaggtggattcttgcccggggcgcacctcccagccacccctcgtcggcccctggagcgtcgcgccgcagccccagtcccagggaggccgcgtcctctgcctggtcctgggatcttgcagaccccatccttctcccaaggcgccgtcccccctcctcccacctccctactcgtgccagagcctgcggctccccaggtctctcctccgcagtcaccgcttccattgaacccacactgggaaggacgcagggccctgtcctgtgacatggggtcttcttgcctgccgagctccagcccttggaaaacgcgctcctccgggatgcaggcgtcttactccaaaccctcctgcgattgtgtgggccgaagggatcaggagacagacagcagtagaaaacctgagacagagaaagaataagaaaggcccataacagatggcaaaatagaggattggtgagggatatgccaagatatggtgaaagtggaaaaagaaagcaacaaaatacctagaaaagcaggtggagaaaagcaactggagaaatgtagagaaaagctagatgtacacagagatgaaggacggcaaggtagggagagtggcagcaaagagggaggctcatcagagtgagggagagagggagggatttggagccagggcagacagagcagagtggtgctggtgtcaaggagaaccgagggagaaacacagcagggaggacacctggggatctggggtgacacagagtggggacaggggagtatatcagggaagagagaatttaacagggagagcagaggaggcgcagagatgggtgaagaggcagaaatagatggagattgaggacgattgaaagattggggagaaggagcaataagaggttaaataagttgcgaggatggagcagaagagatggaagagaaggaatagagggaagaagggggataaacagcagaagagaagaggggtacaaaatgaagagcagaatcccagggagaaagaaaagaaaacaagagctagagagagaagggggagaatgagagatatgtacagaattagggagggaagcgcagtaatgaagaaaggggggctaggcacagtggctcacgcctgtagtctccacactttaggagactgaagcaagagaattgcttgagtctaggagttcgagaccagcctgggcaacatagtgagacccctatctctgccaaaaaaaaaaaaaaggaaataacggggcataatcgtgtgcacctgtactcccagctgctctggaggtggaggtaggaggatgacttgagctcaggaggtccaggctgcagtgaactgagatcatgccactacactgcagcctggtcaacagagcgagatcttgtctcaaaagaaaaaatggggcgagagactgggtttagatcagtggatgagttcattggatatgattagttgtgacatgttgacttccctgtatataatctaataactaaaaacttgtttaaattatacagattgagaattttaaaattggtgtctataaaacatgtacattctataaatcttggcatcagaggttatgttccacttggaatccctattcaaccagagggaagtgacttattcagttgtgaatcactgtcttcccttttcctaggattgggaggatgtggggtagagaagtgggaaaaaagtcgctgtctgttattacataatacttttaatttaattaattaaatgatattttgagtcagggtctggctgtatcacacaggctggagtgcagtggcgtgatcctctaactgtagcctctacctcttggactcaagtgatcctcctacctcagccttctgagtagctgggaccagaggcatgagccaccaagcccagctagtttacatatatatatatatatatattttttttttttgtagaaacgtggtttcactatgtttcccaggctgttctcaaaaccctggggtcaaagggtcctcctgccttggcctcccaaattactgggattacaggtgggattacagggatggcccaccgcgtctggcctacatagccccccccttttttttgagagggagttttgttctttttgcccaggctagcgtgcgatggcatgatctcagctcaccacaacctccgctccctggcttcaaacaattctactgcctcactctccagagtagttgggagtacaggcatgcaccaccatgcctggctaattttgtgtttttagtagagacgaggtttcttcatgttggtccaggctggtctttaactccctacctcaagtgacccgctgcctcggcctcccaaagtgctgggattcctggcgtgagccaccactctcaacccatagtagtttttaaaagggacatcaaggcatggtggctcacgcctgtaatcccagcacgttgggagacagaggtgggtggatcatgaggtcaggagttcaagaccagcctggctgacacagtgaaactcaatctctactaaaaaatacaaaaattagccaggcatggtggcagatgcctgtaatcccagctactcaggaggctgaggcaggagaattacttgaacccgggaagcagaggttgcagtgagccgagattgcatcactgcatgccaggctgggcaacggagctagactccatctgacaaaaaaaaagagagaaagaaaaagtaaggaacatcaaagttgggcctggtggctcattcctgtaatcccagcactttgggagcaaatcactgaaggccaggagctcgagaccaacctggcctacatggtgaaaccccgtctctaccaaaaatacaaaaattagctggccatgtagacatacgcctctaatttcacctactccggaggctgaggcaggagaattacttggacccggctgggaggcagaggttgcagtgagccatgatcacactactgcactccagcctgggtgacagagtgagactccgtctccccgccccccaaaaaaagaaaaattagccaagggtggtggcatgcgtctgtagtcccatctactcaggaggctgaagcaggagaatctctttaggcaggagaatcatgccactacactgcaagctgagtgacagagtgtgacttggtctcaaaaaaacaaaaaaagaaatagcaatcagctctttaatgtctccctttatataagcagtagtcctggccatgttcggtggctcacacttgtaattccagcactttggaaggctgatgtgggcgaatcacctgaggtcaggggttcgagaccagcctgaccaatatagagaaacccggtctctataaaactacaaaattagtgtgtaggtgtggtggcgcgtggctgtaatctcagctactcgggaggctgaggcaggagaattgcttgaacctgggaggcaaaggttgtggtgagccaagatcgcgccattgcactccagcctgggcagcaagagggaaactccatctcaataaataaataaattaattaattaattaataataaaaataaaagcagacgtattcacgtgtagtcaacacgcatgaccaaattctctcacaggcaccatctgcaggaacatcctattggacaataagaactctgaacatcgcttttggccaatataaacattcagaccaggaagtctgcatcatatttttgatgtttttattgtgcaatttgttttatacaatgttttctgtgatctcagtttataaattttcccagtacacattctatgttttatattttacacacagtaactagataactaagggcaatgaatatatataaaattgctgtattgcctggtgttatgtaactgtacttgtgacattgtaattgcaccctctgacactgttagtcagttcttattccttttaatgctgtgtatttacttgaactcatacatcagaaggtagtgatcttaacatgtatttcagtcttatagtgtgtgctggtggtaagtagaagttgtggcttttttcttgagagagaattgtttagaattctgcaggctgtataaatgtacttattatttgcttgctggttttatcatgggttagaatagtttactgattaatatttaagatttcacatatggcttttcagtatatgatatgtaatggaactgacacactgcacttgttaatttcaataagtgcctgttctgcgtggatttaggtaattttatgacaggtattcagaaaaaggttgtattaacatttttttttttttgagatggaatctcgctctgtcactcaggctggagtgcagtggcacaatcttggctcattgcaatctctgcctcccaggttcaagtgattcttgtgcctctgcctcctgagtagctgggactacaggtgaccgccaccacgcctggctgatttttggaatcttttcttatcttctctgtgctacgattatttgataatacagaatttcaattgattttggttacccttacataagcttctggtggattatttaccaatataatatattgtgtggtcttttaggatttatttgtgtacagtagatattgtgtaaatatgaaggatctatacttttcattgatgtgacagtgatatgttttttgcaaactgtgatacattttagggtcacagtggaaaaatactccttactttaggcttacacatgtttgtgccctgtcagcgttttgtcatattggaaataggcttccatagaaatgatttgaagtacacgtaaagtatttattaagtatttattaaagaatcttactccttttgtgttcctaaactttgaagatcatgtttgggaagttcaaaataagtattgttttttgtgtcatatttacacatttcagtatgttttaccttctggacttaattggaaacgtattggtgtttatattttgtagatatctcttccaaatgcttgatgaaaaaggtggaagggtcacttgacccagggagttgaaggctgcagtgagccctgtttttgccaccacactccagcctgggtgagtgagctacaccctatctcaaacaaacaagccaataaatgagaggtataattcctcctttgaaattaaagaaggagattttctttcctttcatctcttttcttaggacatttattagaaaatttgcaagtgcattttctgttttctgaggtagtatgttttctttcttttcttttgtttaattttcttttatttccttttctgttgttttcttttctttcctttccaacggagacacagtttcgctcttgttgcccaggctggagttaaatggtgcgatctcggctcactgcaatttccatctcccaggtacatgagattctactgcttcaacttccagagtagctgggactacaggcacccgctataatgcctggctaatttttatagttttgtagagacggggtttcaccatgttggccaggctggtcttgaacttctgatatcagatgattctccagccttggccttccaaagtactgggattacaggtgtgagccactgcgcccggcccagggatgtatttctgaagaacttgggagctccttgaaaggcaaacaacagccacgcgcagtggctcacgcctgtaatcccagcactttgggaggccaaggcgggtcaatcccgaggtcaggagttcgacaccgcctgacaaacatgttgaaaccctgtctctactaaaaatacgaagaaattagccgggcatggtggcacatgcctgtagtcccagctactcaggaaaattgtttgaacctgagaggcagaggttgcagtgagccaagattgtgccactgcactgtagcctgggtgacaaagtgagactccgtctccaaaaaaaaaaaaaaaaaaaaaaaaggcaagcaacaagatagattgtacctgtgtctcagtaggaaattaagtaattcaaacatcaaatgattccaatttaaagctatggacatttaaataattctgagccttgagaggaatgtggtcatgcaaccagagtctagtggaatgcaggtgcaacttctaggagttttcctggctgactgtcatggctcaagcctgtaatcacaacactttgggaggccgaggcttccggatcacttgaggtcaggatttcaaaaccagcttggctagcgtggtgaaaccctgtctctactaaaaatagagagaaattacaggcgcctgccaccatgcccagctaatttttgtattaggcttagtgttagggtttctccccctccctcgggatgaagcttgttagctgacagagatggtcacctccattaccaagtagagccaggatgaactatgtgtgaccaagggcttttcaagtcctcttccctgaggactgattactgtttatcttgaaaacatgtccttaatgggttgtatagaacactgaagtttctttctctcttttcaacctcttagctgtttgcctctatttcccatcacattctggtctaaagcttatttattaatgaagtagtttttctttctttctctattatcgtcgtggagatgatttctcatttgggggaagactctttgtttttcaattatattttctcacatttaaaaagtgaagtaaagaatatttcctgggccaggcatggtgactcacgagtgtaatcccagcactttgggaggccgaggctggcggatcacttgaagtcagggttctagaccagcctggccaacatggtgaaaccccgtctctaccaaaaatatgaaagttagctgggcatggtcgtgtgcgcttgtaataccagctactcgaaaggctgaggcagaagaatagcttcaacccaggaggcagaggctgcagtgagccacgatctcgcaactgcaccccagcatgggccacagagaaatactctgtctcaaaaataaaaggaaagaaaaaagtaaaaaaagagaaagtaatagatctctttcacaaatgtgctgggacaactaactggatatttacatggaaaagaataatattggatctctatgtcacaccatgaaaaattttatttaaaaacgggttaaaaaaaaaaaggctgggcggggtggatcacatctgtaatcctagcagtttgggaggctgaggtgggcggatcacaaggtcaggagatcaagaccatcctggctaacatggtgaaaccccatctctactaaaaatacaaaaaattagccgagcgtcgtggtgggcgcctgtagtcccagttactccaaaggctgaggcaggagaattgcgtgaacccgggaggcggagcttgcagtgagccaaaatcgtgccactgcactccagcctgggtgacagagcgagactccgtctcaaaaaaaaaaaaaaaaaaaaaaaaagagagaaaaggaaaagagcgagggagagacgagggagggagccctgcgggagggggtgttactttgtcacccaggctggcctggacccccaggttcagcgattctcccgccgctgcttcctgagtagctgggacctcaggcttccgccccgtgcccgcatccctgctgtgtttaggcagcaggtggtgacctcactcctccctggcctgagcactccgtcccgcatcccaggcggaggccctagggaagtctctgaagctgagcacagggtggaccctccctcctgaatgaatggagaatagaaagggggaggatttctgttatgttctgtgggccatcagcatgaaatcgtatattccgccccggcagggctttgcatttcacattttagtttgcatgcccgttccagacaattccagggcttttgaatcatgcttcagccttcctggccgctctcacctccaaacaccgaaaaaaacaggcgctgggtgcgaggcggagggatgcacaggtcccgccccggccccgccctctgtcggttctaaagggcaaggtctctctgcctcgcgccccgcctctaccccgcccaggccccgccaaactgttcgccggccccgcccaggcctggcttcagtcctgggcgcgcaaaccccgaggcggatcgcgtggagtgaaggtcgtaccgcggcgcgtgagttttgctctgccttgtattaagtttgcgcttcccaggtccctggcgcgtctgtccctggaaagtggggtccccacggacctggaaattctcgcctgtcttccttcatccagagcaaattgagatgtccccgtaagagtccggaagttgcttgcttttgggtttgaactcgtccggaggctggtcccaaccccggtctttctgctatagggcagtgtatacacttcctgtcgcttagttttcctggtcaaaaccctgtgctgactccacccaccccgttctttttaaagtccccgacccgcgaggtggattcccgccctgggcgcctcccagcctctccgtcttcggcccctggagcgaagcgctgtgtccccagtcctggggaggctgcgtcttctgcctggtcctggaattctgcaggtgccacccttgtcttaaggcgccgtcgccccctacatcccccctcgtggtgggccctgctgctccccaattcttcccttcgcagtcaccgcttcccctgaaccagcgtagggcaggtcccagcggcttgtcctatgacaccgggtattcttgcctgcccagctccaccctccggaaaatgcgcttctccgcgatgcgggtgtcttaccccaaacccgcagagtggtgctggtggcaatgagaacagagggagaaacacagcagggaggacaccgggggatctggggtgctagagagtggggacaggggggcgtaacagggaagagagaatttaacagggagagcagaggagacgcagagataagaggcggtaatatgtagagattgaggacgatcaaaagattggggagaaggagcaacaagaggttaaataaggaccgggcgctttggctcatgcctgtaatcccagcagtttgggaagcttaggcgggcggatcacctgagatccggagttcgagaccagcctgaccaacatggagaaaccccatccctgctaaaaatacaaaactagctgggcgcggttgcatatgcctgtaatgtcagctattagggaggctgaggccagagaatcgcttgaacttgggaggcggaggttgcggtgagccgagatcgcaccattgcactccagcctgggcaacaagagtgaaactctttctcaaaaaaaaagcggttaaataagttgtgaggatggagcagaagaggtggaagaggagtaatagagggaagaaggggataaatagcaggagagtagaggggtacaaaatgaggagcacaatcccagggaaaaagaaaagaaaacaagagctagagagagaaggggagaatgagagatatgtacagaattagagagggaagcacagtaatgaagaaagaggggccaggtgcagtggctcatgcctgtaatcccagcactttaggagactgaggcagagggattgcttgagtccaggagttcaagaccagcctaggcaaaatagacaccccatctctttcaaaaagaaagaaaaaattaacggggcatgatagtgtgcagctgtaatttcagctactctgtaggcggaggctggaggatcacttgagcccaggagctccaggctgctgtgagcagagatcatgccactgtactccagcctggtcaaaagagcaagaccctgtctcaaaaaaaaaaaaaaaagggtgggggactttgggtacagatgagtgtgtgagttcattggatatgattagttgtgacatgttgacttctgtctataaaatctaataacttgtttaaattatacagatgagtttgagaattttaaatgtcctatctgtgagccatgtatgttctataaatattggtatcagaggttagcttccacttggaatccctattcagaccgagggcagtgacattcaattgtgggtcactcttcccttttcccatggtggggtaggaagtggtgggaaaaaaaaatcgctgttattacataatacttttaattaattaattaatattttgagatagggtctggctctgtcgctcagctggagtacaatggcgttatctactctaactgcagcctcgacctcttaggctcaagcgatcctccctcagtctcctgagtagctgagaccactggtgtgagacaccaagcccagctagtagttttttttttctttgtttgtttttttgtagaaacagggtttcagtatgtttcccggggtggtctcaaaatcctgggctcaaaggttcccccgtcttggccttgcaaagtactgggattacagggatgagccaccgcgcccggcctacatactaattattattattattattattagttttttgaggtggagtttcactcctgttgcccaggctggagtgcaatggcacaatcttggctaatgactctctgtgcctttagagttgaagcgattctcctgcgatactaccccctgagtatctgggattacaggcatgcgccaccatgccctgctaattttggattaggaggccgaggcaggagaatcacttgaacccaggaggcagaggttgtggtgagctgagatcgcaccattgtacttcagcgtgggcaataagagcgaaactctgtctcaaaaaaaccaaaaaagaatggagcaaaacaggagaggggcataaaatgagcagaagcccagggggaaatgcagaaaagaaacagatggagagagaaagtgagaaagggctatgcatagaatgatggagggaagcagtaatgaagacgaagagggaccctgggtgcagatgagtggtgagttgattggatgtgatgatgaagtgatgacatgttgttttctctgtttataaggtaacaaatttaaaattagtttaaattatacagatgagaatgagagttgccaaactcctgtgtctaagtgtggttcattttataatgatggcgtcagaggcagcttccctctgcaacccctcttcagccagaggacagtgacttgactcattcgttgtggatcaccctcttcccttttcatggctggggtcgggagtgggggagagaagtagggtaagaagtgactgactctgttactatatggaacgtgatgaaaggagtattaaaagtgcttttgttctctttttgtaattggtttccttttttctagttcctcttcatttcattttttttttttttttttttaatttttgagatggagtctctctgtgtcacgcaggctggagtggagtggagcagtcttgactcactgcaacctctgcctcctgggttcaaggaattctctgcctcagcctcccaagcagctgggattataggcacctgcagccacacctgtctgatttttgtatttttagtagagacagttttcaccatctaggcgggacttgtcttgcactcatgaccttgtgatccaccgccttggcctcccaaagtgctatgattacaggcgtgagccaccacacttggcctcagtaattgttttttattttttaattttagttttaatttacttatttttgttgtggtggtttttttttttttttttttttttttgacggagttttggtcttgttgcccagggtgaagtgcaatggtgcgatcttgctcactgcaacctttgcctctggggttcaagtgattctcctgcctcagcctcctgagtagttatgattacaggcacacaccaccatggccggctaattttgtattttcagtggagatggggtttctccatcttggtcaggctggtcttgaactcctgacctcaggtgatcctcccacctcagcctcccaaggtgctgggattacaggtatgagccgctgcgcccggcctttgttattgttttgagacacttttactgtttcccaggctggagtgcagtggcaggatcacagcactgtgcagcggcaacctcctgggctcaagtgattttcccacctcagcctccggagtagctggggccacagacacaccccaccaggtccggctaatgtttagatatatgtatttatttattgagactctctgtcacccactctggagtctagtggcacgacctcgtctcactgcaaactccgcctcctggggtcaagcgattttcctgcctcagcctcctgagtagctggagttacaggtgtgcaccactatgccctgctaatgtttgtatttttagtagagacatagtttctccatattggccaggctggtctcgaacccctaacattgtggtcttcctgccccggcctcccaaagtgctgggattataggcgtgagtcactatgcctgtcctcattgttttcaaagtatgatatattttcaaatatttctcctttggcccaagatttcattagatctgtattttttaaccattttaaaattgtttctctatgaaatttttttgagtttacattgaggtctgtgtgctttctagtctttatcatatatcgaaaacattttctactatgtgatatatgttgttaggttgtttcagtgtgtacttgataatgatatcaaggaccttttttctttaccctaacatgaaaattcagttgaagtagcctattccatttttttttcttatgtcatctgaaaaaatggtaatctgtgagcttctaagtaagtgtcccctcaattccctctggtccataatattctctacagatgttgaaggatgggctggattgacttggaaccttggtttagcagagcccatgtgttcttgagaaaagcatttgctcagatctcatttctacagctgcctctttttcagtgttttaaacatctattgctatgtgtgcacagttgtgtgtattttgaacatttttctgggagtgagtaatgatatgtttgggattgatgccatcagaaccttacaacttgaaagaagtttcgtttgctcaggtatataagatggtcctggaatttttgtttgtttgtttgtttttctttgagatggagtctcgctctgtcacccaggctggagtgcagtggcatgatctcagctcactgcaacctctacctcctgggttcaagcaattcttttgcctcagcctcctgagtagcagggactacaggcccccgccaccacgcctggctaatttgtgtatttttagtagagacgggatgtcaccatattggccaggatgatcttgaactcctgactttgtgatctgcccgcctcagcctcccaaactgctaggattacagatgtgatccaccccgcctggccttttttttttttttaaaccgtttttaaataaaatttttcatggtgtgacatagagatccaatattattcttttccatgtagatatctagttaggtattacaagggtgagtcaccgctcctgactggtctggaaattttctagaggaggaagaccaaggcagcctattggccctttcaggcaatcacatgggaatcagccacatgtccttcctcctcacctcagagcatctcagaataacttggtgaaatgtctcccactgtgagcctcagtgagcccacctgtaacatagaggtgaggaataagaccggaaaagctcagtcagagtgacactgacccctgaaatgactgacaaaatacagtgtgtgacttttcttctgggagaggtagtgctcagttttaactcgaattttaaagggattccagttctccaaatattaaaaaaaaaaaagcacaagatgattaaaatcaggggattagactcaaatcaccttgaaccttatcatctcacagctttaacccacttacacgactccatgtcccctgcaggcgtcgcccctgagctctacaatcctgtgtccagttgtctcagctgtctcctgggtcatcaaacaggcatccccaccttcaggtgtccacgagtggctttctaaacccccaaacacatttccttgcagtctgcacatctcagatgagagtgactgtgtacttctggaaacttagccaaacttgacagcatgtattttatatttgtgaaataaatcactttatttgtaagtgttgtaatttataatataaagagaaacttagatgtatacgtgaaaagagtgagaagatacatcacttccaatttttttttttttgagacgaattttcactcttgtggcccaggctggagtgcaatgccacgatctcagttcactgcaacttctgactcctgggatcaagggattctcctgcgtcagacacccgagtagctgggatcacagtcgactttcaaaatgcttttgggttgtgggagaaaaatgtttgaaaaccatgtccctatgggtctgtgcccccaggacctctctgacctcatctcctacctgtgccctcctctcttccactgctccagccccacgggtcgctttccttttcctggggctgaggttgctcctgtctcagggccctcacttgagctgtccctctctctaggatgctcttcccctcagctgcaagtgacaagcagcctttctttcctaggtccttgttctgatatcatcttctccgggtttcctttgtgatctcccacagcccccatttgacactgcagctgtgaaaccagaaaatcttacagagatctcagttatttagagagtttagtttgcccaaggtggtcggggcagagcttaattttatacattttatggagacatgagacatcaatcaatatatgtaagaagtacattggtttggtctgggaaggcgggacaactttaaacaaaggcaggaagacttgaagcagggaggcggcttttaggtcacagagaaatgaggcacaagtagttacaatcttttgagtttcctttttttttttgagatgaagtctcattttgtcgcccaggctggagtgcagtggcacgatctcgactcactgcaacctctgcctcctgggttcaagtgattctcctgcctcagcttcccaagtaggtgcccagatcttttttttggggggggggtggaggctttgatcagggatgagtctgtgccataaagggggcatcagtgcagcccaggtcccccctgctgcctcgtgtgtggcggcttctccatgaagggagtgagatctgaagaccggggtcaaacatacacttgtaggtcttcctgtgggactttcttacctctgcatgatctctggtgcagtgggcagtgggggacttctttctacagggtgacatctcccggttcatgtggttttgtcacaggaagggagtgagtcatttctaacatgaagtcttattttttttcacatacaggattgatttctaaagactcatgttacgtgaggaagcagctcagaagaggaaaggaaaggagtcaggcatggctcttcctcaggtgaagtgatattcctctgtggattaatctgtctctttcctttctgaaatgtagtagtattatattgtattgtagtaatgtattgtagcagccagtcttttctgagtctgaagcattttgcctgacacgttcacttgcactcacccatgcctgccctcagttcctctcaggtgctctgagattccatctcctgtgacccagtgacatgaacttgggaagaggctccactgggcatggtcttgggaagggctcacacccagacgtggataaacatggggtgtgggcccgttgatgtcagagctgctgggcagcctggattgttcaggggccacatctggatgtcagctcagagaaactacatatgaaatacgtatgttaatgtgcgcagatgtgtggtaaattctgggaaaggagacgaataagaggagatattttgtatctgatttggtaatgcatttgaagccacactagtagatcaagatgtctctgtgtccaaattttttttttttttttaagagacaagatgttggtcccagtgcagtggcttacacctgtaatcccagcattttgggaggccaaggcaggaagatcacttgaggtcaggacttagagaccagcctggctaacatggtgaaaccccatctctactaaaaatacaaaaattagctgcatgtggtggtgcatgcctgtaatctcagctactcaggaggctgaggtaggagaatcacttgagtccaggaggtggaggttactgtatgccgaaattgtgccactgcactccagcctgggagatggagcgagactctgtctcaaaagaaaaaagagagagagagaaggtgtcgctctgtggcttagttctggagtacaatggcacaattcagagtttacagcagcctcaaactcctgagctcaactaatcgctactgtagcctcccaaagagcctgaatgataggcatgggtcaccatatgtatgtgtgtatattatgtatgtatttatttattttaagatggagtctcagtcagcaaagctggagcgcagtggtacgatctcggctctctgcaacctccccctcccagtttcaagcaattcttctgcctcagcctaccaagttgctgggactacaggcatgcaccaccacacccagctaatttttgtatttttagttgagacggggtttcatcatgttcgttatgctgatctggaactcctgacctcatgatctgcctatctcggactccctaagtgctgaggttaaaggtgcacaccaccatgtcaggccttattttttatattgtatttttattttgttgtctaggctggagtgcagtggtgcaatcaaagcttgctttagccttgatatcctggcctcaagtgatcctcccctcttggtctcccaaattgctggcattccaaatgggagacagccagcttggctggactctgcacatttttgagatggagtgtcgctctgttgcccatgttggattgtagtggcggcatctcagctcactacaacctctgccttctggcttcaagcaattcttttgcctcagcctcctgagtatctgggattacaggcattcgctgtcacgcctggctaattattttgtatttttagtagagatggggtttcaccgtattggtcaggctggtcgaactactgaccttgtgatttgttcacctcggcctcccaaagttctgggatttacaggcctgagccactgcacttggctaaagtctgcacttttaatgactgtcaatgcaatggaaagtggagataggcatcagtggtacaggatgctttattacatcattgattttattttatttttaaatttgttttgagttgagtctctgttgtccaggcaggagtgcagtggggtgattttgtttcactgtagcctctgactcccagattacagtgattctgttgcctcagcctctccagtagcttggattagaggtgggccaccacgtgggtaacgccatgatgtgatgtgtgtgcatgaatacatgggtggataagcccatggtttatgtagaaaacacaacatttgcaataagttttattttttataataattgtaatgattttaagtatttttcattgttgtcaactatcacaataatgagttaatggtaagatggggccgggcccggttgctcacacctgtaatcccaccactatggaaggctgaggtgggtagctcatgacatcaggagttcaagaccatcctggctaagatggtgaaaccctgtcgctgctaaatatacaaaaattagatggatgtggtggcaggtgcctcaaatcctagctactggggaggctgaagcaagagaattgcttgaacctgggtggcacaggttgcagtgagctgagagattgtgccactgtattccagcctgtgcaatagagtgagactccatctggaaaaaaaaaaaaataagaagtattgggaaggattatatgtatgcctgtgtgtgtccattcagcgaccttgtaggatgctccgtgttcttaccctgggacctttgtcacattctctgcactagataaacccgtgtcagtttagtttaaagctgtatctgttacttcagcgtttatattcaaatgtgaatcccagacatctggattcagtgcttgtgttgacatttttagctatttgatttgtggtaattttcctagtatgtgtgatgcacttgtgtccaagtacagatctttcttcatgggacagtatgttattttatggcttaagacatgggaagcacttagaacagtgtatagcacatgggaagcattcaaaaatgttagtcatggctattgctgtcatcataacagttttttttttttttttggagacagagtattgctttgtcacccaggctgaagtgcagtggcatgatattgggtcattgcaacctctgcctcctgatttcaagcaattctccagcctcagcctcccaagtatcagggattacaggcacccaccaccacacccagctaatttttgtgtttttactagagaaggggtttcagcgtgttcccaggcgggtctcaaactcctgacctcatgatccacctgccttggcctcccaaagtgctgggattacaggcatgagccactgtgcctgaccgatcatgatagtttttagatttggacttttctttcaaagccaatggactctgtcctctctgaaacaccgcttgtatcttagttcatctagagactaaatatcgccttgtatgttgaacataatagctgacatgtctgtagagaaaaccctgtgtttgcttttttttttttttttttttgagatggaatcttgctctgttgccaagctaaagtgaagtggtgcgatctcggctcactgcaacctccgcctcctggattcaagcaattctcctgcctcagcctcttgagtagctgggagtacaggcctgcgccacaacacctagctaatttttgtattttcagtagagatgtggtttcgccatgttggccaggaaggtcttgatatcttgaccacattgtctacctgccttggtctcccaaaatgctaggattacaggcgagagccattgcctggaattgctttttttttttttttttttttttagatggagtgtcagtctgttgcccaggatggagggcagtggtgcgatcttggctcactgcagcctccatctcctgggttcaagtgattctcctgcctcagcctcctgtgtagctgggattacaggtgcctgccaccatgtccgtctaatttttatatttttagtagagacaggttttcaccacgttgaccaggctggtctcaaactcttgacctcaaataatctgcccaacttggcctcctgaagtgttgggattacaggcatgaaccacctcacccggccctgtgtttcctttttatttatatagtttttatattgtccataaaatcgagacttccatagtgacttatgggatcttaaaatctttcaaggaaaagtacaataaaatgcaactatacggaaaaaatagtcaaaaataccttaacatccttttgtcagaacacagtctttgatcaaataaatacttattttcccttttctcatttcctgtgaaggtgataactcaatcctccataatgttttgttgaaatgtatgtttcattttagggacgcttgactttcagggatgtggctatagaattctcattggcagagtggaaattcctgaaccctgcacagagggctttgtacagggaagtgatgttggagaactacaggaacctggaggctgtgggtgaggaaaatgtccctgcagacatgaggagtctgctcctgtctatcttggctcttcctggttttgtattctcttttgtgattttgccccatccatgctggttttttttttttttttttttgacatggagttttgctcttgtttcccaggctggagagcaatggtatatcggttcaccataacctccgccttccaggttcaagtgattctcctgcctgagcctcctgagtagctgggattacaggcatgcgccaccatgcccagctaattttgtatttttagtggacacagggtttctccatgttggtcaggctcgtctctaactccagacctcaggttatccgcccacctcaccctcccaaaatgctgggattacaggcgtgagccaccatgcccagctcattctggtttttgaggagcatcacagaagcgtctctcactggcactgtgacaacgttcatcccataaactaatgatcatcttctctaagcagcagtcagtggtgttgcaattcctcccagcgaggacatcattcgggctcacagcctcatatgtatgaggctcttgactgaactcttgttcatgtcacatttttcacaccaatatgtgtcactgttcatttttaacaagaaaacctatgttcagtttgttgtaggatcaaccctgtaagagatatggttttcatcaatcttattgagggagcttgtgaggttgaatgaggtttccatagtttagttctactgtcatttccttaagacacagtgcctttcaacttgttcatttctatgttgttgttgtttttttctcatagtcttgctctgttgcccaggcttgagtgcagtggcatgatcttggctcaccacaacctccaccttttgggttcaagtgattctcctgcctcagcctcttgagtggctgggattacaggcatgtgtcaccacacccgggtaatttttggtggttctattacagatggcagtttcaccatgttggccaggctggttttgatagcctggcctgatgtgattcagctgccttggattcccaaagtgctgggattacaggcatgagccacagcccctggcccatccgagttgtttttaaggctgaataatattccattgtatgtgtataccacattttcctcacatatttatctgtcgatgcacatctttactattataaataatactaccaggctgggtgcggtggctcacgcctgtaatcccagcaatttggaaggctgaggtgggtgaatcacctgaggtcaggagttcgagtccagcttggccaacttggtgaaaccacatttctattagaggtacagttttttttttgtttctgttttttttaagatggaatattgctctgtcacccaggctcaagtgcagtgcagtggtgtaatctcagctcactgtaacctccacatcccaggtcaagcaatctcatacctcacgcttctgagctgttgggattacacacatgcaccaccatgcccggctaatgttttgtattttttttagtagagacagtgtttcaccatgctggcctggccggtcttgaactcctgacctcctgatgcacccgctcatcctcccaatgtgctggtattacagacatgagccactgcactcagcctagctctgttttcacaaacacatctctacctactgtgccaggggatccttgttcacccccatggtctactgtactcttcatagagtttacttgtttgtttgtgtgtatgcctttctggtatctacacaggggatattgttgagtatattcttgaaactggaaatcagagtcacttaatttaaggatgtaaaactgctttcacctcaggccaccatactgctgcttttttggatctctttcattcttgtcccttgcccatattgtaatttgaatatttaaccttgggtcaatattttaacatttgctcaattagttccactttcgtccaagctcaagatttggtctatcctagtggaattatattcccacagaggtgcatgcacaaagtttactcctacatgcccattacttcctgctctccacccttgcccttcctttcctggccttgactcacatgatacattgatctggatgcaaatactgtttctttccagcctattgattttgtaatgctgaacaccccaatttccccgtgagcccctcccctccaacaccactctcactgagtaagtcaagaccttgttcatccactggacaaaattataggaggccgcttaaatcagtgtgtgcagggcatcatgactcagcacatgatccatgagggatggcttcagaaccactgtcagcagcgcagctcagcgcttgtgtcccagctcagcctttgtatcccccttgatgtacttctatctgttctccttgtattttctggtctggtcattttctgtactgcctgtgctgactattgtgcctaagaacatgtcgtgggatccttcatgcccaggattaagtcttgtccctcacttaccttatgtgcaaactggggtcatgtccatgaacactgtgggcctcctgtcattatttgagaaataatgataatttgcctccagggttggttttttttttttgtttttgagatggagttttgctcccgttgcccaggctgaagttcaattgcacaatctcagttcaccacaacctccacctcctggatttaagcgattctccttcctcagccttctgagtagctgggattagaggcatgcaccaccacacctgcctaattttgtatttttagtacagatggggtttccccatgttggctaggctggtctcaaactcctgacctcaagtgatctacctacctcagcctcccaaagtgctgggattacaggcatgaaccactgtgtccgggctatttttttttttttaatggagtttccctcttgttgcccaggctggagtgcaatggtgcaatcttggctcactgcaacctcgacttcctgggttcaagtgattgtcctgcctcaggctcccaagtagctgggattatgcctggcacaagcctggctaatttttgtatttttaggagagatggggtttctccatattggtcaggctggtcttgaactcccaacctcaggtgattcatccacctgctttttaaaacaagtgaatactattagatggcttcatataagttttatagtacattctcaacttcctttgtttaataagatttttcagccttcagtgatgttgatgatgagatgccccttttcctgcctcactcatctcactgttctgtcagaaatagcttagactggccagcttcagtggctttcacctctaattctagcactttgaaaggctgaggtgggtagatggcttgaggtcaggagtttgagaccagtcaggcaaacataatgaaaccttgaatctactaaattaaaaaaaattgggcatgatgactcatgcctataatcccaaacttttgggagggcgagacgggtggatcacctgaggtcagaagttcaagaccagcctggccaacgtggtgaaaccccgtctctagtaaaaatacaaaaattagctgggcgttttggtatgcacctgttatcccagcttcttgtgaggctgagacaggagagtcacttgaacctgggaggtggatggtgcagtgaaccatgatcatgccactgcacttcagccaaggtgacagagttagattccatttgccaccaaaaaaaaaaaaaaaagttagccaggcatggtggcatgtgtctgtactccctgcctagctgttagtccattcttagttcttaaaatgttgtatattttcttgacctcatacatcagaaggtagtgatcttaacatgtatttcagttcttatattgtgtgctggtggttaagtagaagttgtggcttttttcttcagaggaagttgtttagaattctgcgggctgtataaatgtacttatttgcttgctggttttatcatgggttacaatattttattaattaattttataattttacatatggcttttcggtatgtggtatgcaatataactgacacactgcactcgttaatgtcacaaagtgccaccaggtgcagtggctcacacctgtgatcccagaaatttgggaggtcaaggggggtggattacttaaggtcaggagtttgagaccagcctggccaacatggtgaaaccacatctctactaaaaacacaaaaattagccaggtgtagtggtgtgtgcctgtaatcccaggtactcaggaggttgaggaaggagaatcacttcaacccagcaggcagaggttgcagtgagctgagattacaccatgacgctccaagttggagtgcaagactccttctcaaaacaataaaaatggaaacaaatttttttttttttttgagatggagtctcactctgtcgcccaggctggagtgcagtggcatgatctcagatcactgcaaagtccacctcctgggttcataccattctcctgccacagcctcccgagtagctgggactgcaggcgcctgtcaccacgcctggctatttttttgtgtttttagtagaaacagagtttcaccgtgttatccaggatggtctcgatctcctgaccttgtgatccacccttctcggcctcccaaagtgctgggattacaggcatgagccaccgcacccggcccaaaaattttttcaaaagtcactaagtgcctgttctgtgtagatatatataattttatgacatttatttagaaaaatattgtactaacttttttcttttttttttttttctgtttgaggcagagtctactttgccaccctggcaggagtgcagtggtgtgatcttggctcactgcaacctctgcctcccgtgttgaagtgattcttgtgcctcagcctcctaagtagctgtgactacaggcacggaccatcacacctggctaatttttgtaatcttttcttatcttctcagtgctataattgtttgataatacagaatttccagtgcttttggttatccttacatgagcttgttgtggattatttaccaatatagtatgttgtgtggtttttttttttttttagcatttatttgtacacagtaaatatggtttaaatatgaagaatatatatttttctcttccttgatgtgacagtgatatgttttttgcaaattgtgatgcacttcaaggtcacagtggaaaaatactccttactttaggcttatacatatttgtgccctgtcagtgttttgtcatgatataggaaatagactttcatagaattgatttgaaggacatgtaattgccctttatttactaaagaatctcactctttttgtgttcctaaactttgaatatcatgtttgggaatttcaaaataagtattgttttttgtgtcatatttacacacttcagtatgatttaccatctgtacttaattggaaatgtattggtgtttatattttgtagatatctcttccaaacacatgatgaaggaggtcttgtcaacagggcaaggcaatagagaagtgatccacacagggacattgcaaagacatcaaagttatcacattggagacttttgcttccaggaaattgagaaagaaattcataacattgagtttcagtgtcaagaagatgaaagaaatggccatgaagcacccacgacaaaaataaaaaagttgactggtagcacagaccaacatgatcacaggcatgctggaaacaagcctattaaagatcagcttggatcaagcttttattcacatctgcctgaactccacatatttcagatcaaaggtgaaattgctaatcaacttgagaagtctaccagtgatgcttcctcagtttcaacatcccaaagaatttcctgtaggccccaaatccatatttctaataactatgggaataatcccctgaattcttcattactcccacaaaaacaggaagtacacatgagagaaaaatctttcccatgtaatgagagtggcaaagcctttaattgtagctcactcttaaggaaacaccagataccccatttaggagacaaacaatataaatgtgatgtatgtggcaagctctttaatcacaagcaataccttgcatgccatcgtagatgtcacactggagagaaaccttacaagtgtaaagagtgtggaaagtccttcagttacaagtcatcccttacatgccatcatagacttcatactggagtaaaaccttacaagtgtaatgagtgtggcaaggtctttcgtcaaaattcagcccttgtaattcataaggcaattcatactggagagaaaccttacaagtgtaatgaatgtggcaaggcttttaatcaacaatcacacctttcacgccatcaaagacttcatactggagtgaaaccttacaaatgtaagatttgtgagaaggcttttgcgtgtcattcctatctggcaaaccatactagaattcatagtggagagaaaacatacaagtgtaatgagtgtggtaaggcttttaatcatcaatcaagccttgcacgtcatcatatacttcatactggagagaaaccttacaaatgtgaagaatgtgacaaagttttcagtcagaaatcaacccttgagagacataagagaattcatactggagagaaaccatacaaatgtaaggtttgtgatacagctttcacgtgtaattcacagctggcacgacatagaagaattcacactggagagaaaacttacaagtgtaatgagtgtcgcaagaccttcagccgcaggtcatcccttctatgccatcgtagacttcatagtggtgaaaaaccttacaagtgtaatcagtgtggcaataccttccgtcaccgggcatcccttgtataccatcgtagacttcacactctagagaaatcttacaaatgtacggtttgtaacaaggttttcatgcgtaattcagtcctggctgtacatactagaattcacactgcaaagaaaccttacaagtgtaatgaatgtgggaaagcttttaatcaacaatcacatctttcacgtcatcgtagacttcatactggagagaaaccttacaaatgtgaagcatgtgacaaagtttttggtcagaaatcagctcttgagtcacataagagaattcatactggagagaaaccatacagatgtcaggtttgtgacacagctttcacgtggaattcacagctggcacgacatacaagaattcacactggagaaaaaacttacaagtgtaatgagtgtgggaagaccttcagttacaagtcatcacttgtatggcatcgtagacttcatggtggagagaaatcttacaaatgtaaggtttgtgacaaggctttcgtgtgtcgttcctatgtggcaaaacatactagaattcacagtggaatgaaaccttacaagtgtaatgagtgcagcaagaccttcagtaacaggtcatcccttgtatgccatcgtagaattcatagtggtgagaaaccttacaagtgtagtgagtgcagcaagacgttcagtcagaaggcaacccttctatgccatcgtagacttcatagtggtgagaaaccttacaagtgtaacgactgtggcaataccttccgtcactggtcatcccttgtataccatcgtagacttcatactggagagaaatcttacaaatgtacggtttgtgacaaggctttcgtgcgtaattcatacctggcaagacatattagaattcacactgcagagaaaccttacaagtgtaatgaatgtggaaaggcttttaatgaacaatcacacctttcacgtcatcatagaattcatactggagagaaaccttacaaatgtgaagcatgtgacaaagttttcagtcgcaaatcacaccttaaaagacataggataattcatactggagagaaaccttacaagtgtaatgagtgtggcaaagcctttagtgaccggtcaacacttattcaccatcaggcaattcatggtatagggaaatttgattaatataatgattgtcacaaagtcttcagtaacactacaacaattgcaaatcattggagaatccatgatgaagagaaatcttctgagtgtaataaatgtggcatgtttttcagacattgttcatacattgcagttcattggcaacctcatactggagagaaaccttacaaatgtcatgattgaggcaaggtcttcagtcaagcttcatcctatgcaaaacaggagaattcatacaggagagaaacctcacaagtgtgatgattgtggcaaagcctttacttcacattcacacctcgttggacatcagagaatccatactggacagaaatcttgcaaatgtcatcagtgtggcaaggtcttcagtccgaggtcactccttgcagaacatgagaaaattcatttttgagataactgttcccaatgcagtgagtatagcaaaccatcaagcattaattgacattggagtcaattcagcattgacttgagtttgtgttgacttaacattgagttcaagccttaattgacattcaagtgtttatgttaagaggatggggccaggtgtggtggctcaggcctgtaatcccagcacgttggaagaccaaggcacataggtcacttgaggtcagaagtttgaaaccaccatggccaacagatgtcggccactttcgccatcctgttttttgtttcttattttcttatttatttatttatttattttgagatggagtgtcactcttgttgcccagcctagagtgcaatgatgtgatctcagctcaccacaacctccgcctcccgggttcaagcgattcctctgcctcagcctccctagttgctgggattacaggcatgtgccaccacacccggctaattttttgtatttgtagtagagacggggtttctccatattaggctggtcttgaactcccaacctcaggtgatctgcccaccttggcatcccaaagtcctgggattacaggcatgagccaccgtacccggtcttgtttcttattttctattttttatttttttgagaggcaggagaatggcgggtgaacccaggaggtggagcttgcagtaagcccagatagcaccattgcaactccagcctgggagacagagtgagactccgtctattaaaaaaaaaaattataaataaaaaaatgtattttaaccagttagtctggttttcagtttcctttccttatgtcatttgttaaaatcttcagctgggagctatttattgcgtgtttctctcaaggccctctggaccattctggaaaaatgttgaaacatgggctggagtggcatagaatgctcctccaaaagcacccatgtattcttttgctttgtttgtttgtttttttttaaatggagtctcgctctgtcgccttggatggagtgcagtggtgcgatctcagctctgcaacctctgcctcccggcatcaagtgattctcctgcctcagtctcctgagtagctgaaattacaggcacctaccagcacacctggctaatttttatatttttagtagagacagggtttcaccatgtttgtcaggctggtctcaaactcctgacctcgtgatccgccagacctggcctcccaaggtgctgggattacaggcatgagccaccgtgccccgcctctttttttttttttgagatggagttttgctcttgttgttcaggctggagtgcaatggtgcgatctggtgtcactgcaacgtctgcctcccgggttcaaggcattctcctgcctcagcataccgagtagttgggattacaggtgccctccaccactcccggctaattttttgcattgttagtagagacagggttttaccatgtgggccaagctggtctcgaactcctgacttcaggcgatctgccgaccttgccctcccaaagtgctaggattacaggcgtgagccatcgtgcctgaagactcatgtattcttgattgaaataatttgcttatgtctcagttctacagttgaccttctttcactgttttcaaggtcaatagctgtgtgttcacacttctgcattttataaatgttactgtgattttcttgtaaggaagaattaactgtcgggaatcaatgtcatcagaatcttgcaaaagaagtttctttagcataggtatgcgtaagatgcttctctgattttcaaggatgtgggtgataagaccaacccctcccattagcccttccaggcccccatgtaagacttcacacacaccttctcactcatctcagaccttgtcagtgtaacttggtgaaaatgtgagcctccctgcaacttggcgatgaggggcttcaccagaaaagctcagcccgagtgactctgacccctgaaatgactggcaaaatggagtgcgcgtctaggtgtggctttttttttttttttttttttttttttgagggtaggagtgcccagttgtaattagaattttctttctttcttttttttttttttttgagacagagtctcgctctgttgcccaggctggagtgcagtggcgcaatctcggctcactgcaagctccgcctcctgggttcacgccattctcctgcctcagcctccggagtagctgggactacaggcgcccgccaccgcgccttgtatttttagtagaggcggggtttcaccctggtctcgatctcctgacctcgtgatccgcctgcctcggcctcccaaagtgctgggattacaggcgtgagccaccgcgcccggcatctgaactttgttttatttattttttttgagacagaatctcactctgtcacccaggctggagtgcagtggtgtgatctcggctcactgcaacttccacctcccaggttcaagcgattcttgtgcctcagcctcccgagtagctgggactataggcgtgtgccaccacgcccagctaatttttatatttttagtagagacagagtttcaccatattggccaggctggtcttgaactcctgacctcgtgatccgcccgcctcggcctcccaaagtgctgggattacaggcatgagccaccatgcctggcagcatctgaacttttaatgacttggaattgtggggaaaagagagagatcagactgttactgtgtctatgtagaaagaagtagacataagagactacattttgttctgtactaagaaaaattcttctgccttgagatgctgtgaatctgtaaccctagccccaaccctgtgctggcagaaacatgtgctgtgtcaactcaaggttaaatggattaagggctgttcaggatgtgctttgttaaacaaatgctagaagacagcgtgcttgttaaaagtcatcaccactccttactctcaagtacccagggacacagaacactgcgaaaggccgcaggaacctctgcctaggaaagccaggtattgtccaaagtttctcccatgtgatagcctgagatatggcctcatgggaagggaaagacctgaccatcccccagcccaacacccgtaaagggtctgtgctgaggaggattagtaaaagaggaaggcctctttgcagttgaggtaagaggaaggcatctgtctcctgctggtccctggacaatggaatgtctcggtgtaaagcccaattgtatattccatctactgagataggagaaaactgccttagagctggaggtgagacatgctggaggcagtactgctctttaaggcattgagatgtttatgtatatgcacatcaaaagcacagcactttttcctttaccttgtttatgacagagacatttgttcaggttttcctgctgaccctctctccactattaccttattgtcctgccacatccccctctccgagatggtagagataatgatcaataaatactgagggaactcagaggccggtgcaggcgcgggtcctctgtatgctgagtgctggtcctgtaggcctacttttctttctctgtactttgtctctatgtctctttcttttctcaaatctctccgttccacctgacgagaaatgcccacaggtgtggaggggcaggccaccccttcaggaatggaatggaaagtgaagatacacgtcagtggtacagggtgctttatcacatcattgattttattatttttttctttttttgagttgagtctccctctatcacccaggatggagtgcagtggtgagattttggctcactgtagcttccaccttccagattacagtgattctgttgcctgagcctctcgagtagctgggattagagatgcacgccaccacgcttgtaacggcatgatgtgatgtgtgtgcatgaatacatggatggataagcccatggtttatgtagaaaacacttgatttgcaataaggtatattttttatagttgttatgattgtaagtatttttcatttttgttaactatcacaatgatgagttattagtaaggattggccgggtgaggtggctcacgcctgtaatcccagcactttgggaggcccaggtgggtgaatcacaaggtcaggagtttgagatcagcctgggcaaaatggtgaaatgccatctcaactaaaaattagccaggcctggtggcaggtgactgtaatgccagctactcgggaggctgaggtaagagaattgcttgaacctgggtggaagaagttgcagtgagccaagattgtgccactgcactcctgcctgggtgatagagtgacactccttctcaaaaaaaaaaaaattaaaaaacgtcataattattaatattattattattacaggcatgagccactgtgcttggcctgcctctgttttcacagacacatctcttcatactcagccaagggatccttcttcacatccatggtctctacattgctgtactcctcgtagactttactcattttttttgtgtgtatgaaattctggaatctacacaaggcatatttttgagtatatgcttgaaactagaaatcagaggccattttacctaagagatgtaaaactgctttcacctcaggccaccatactgctgattttttggatcttgttcattcttgtcccttgcccatattgtaatttgcatagttaaccttgggtcagtattttaccatttgctaaattagttccattttcctccaagctcaaaacttggtctatcccagtggaattatattcccacagatgtgcatgcacaaagttcactcctacgtgcccattcctgccctccacccttgccctccttttcctggccttgcttcacatggtacattgatttggatgcaaaatactgttgctttccagcctattgattttgtaatagtgaacaccccaatttccccatgagcccctcccctccaacactactctcactgagtaagtcaagaccttattcatccactggacaaaattataggaggccgcttaaatcagtgtgtgcagggcatcatgactcagcacatgatccatgagggatggcttcagaaccactgtcagcagcgcagctcagcgcttgtgtcccagctcagcccttgtatcccccttgatgtacttctatctgttctctctctctctctctctctctctctctctctctctctctctctctctctctctatatatatatatatatatatatatatacactttttttattatactttaagttctagggtacatgtgcacaacgtgcaggtttgttacacatgtatacatgttccatgttggtgtgctgcacccattaattcatcatacttctttctgttcttgtattttctgtgactggtcattttctgtactttcttggcagactactgtgcttaaaaacatgggatccttcaggcccatgatcaagtttgtccctcacttagcgtatgtgcaaattggggtcatgtacatgaacacactggcctgctgtacttatttgagaaataatgttaatttgcctccagatttttttttttttttgagacggagtttcgttcttgtttcccaggctggagtgcaatggcgcaatctcggctcaccgcaacctctgcctcccaggttcaagcgattctcctgcctgaggctcccaagtagctgggattacaggcgtgtaccaccacacccagctaattttgtatttgtattagagatggtgtttttccatgttagtcagactgctctcaagctcccgacctcaggagatccacccgcctcggtctcccaaagtgctggaattacaggcatgagccacggtgcctggctgcctccagggttttaaaacaaattaatgctattagatggcttcacatattgcaggttttatgctacaggctctaaacttcctttgtgtaataagatatgtcagccttccctgatgttgatgatggcatgctccttttcctgtctccctcatttcactgtcctgttagaaatagcttagactggctggccacagtggctaacacctctaatgccagcactttgggaggccaaggtgggtagatcacttgaggtccagagtttgagaccagtcaggtaatctcagcactttgggaggctgagactggtggatcacctgaggtcaggagtttgagagcagcctggccaacatggtgaaaccctttccctactaaaagtacaaaaattacctgggtgtggtgtaacatgcctgaaatctcagctgcatgggaggctgaggcagtaggatcatttgatccctggaggtggaggttgcagtgagccaagatcatgccattgcactctagcctgggcaacaagagaaaaactccatctcaaaaataaagaaagaaagaaagaaaaaatataaataaaagcaccagtcttattcatatgtagtcaacacccatgaccaaattctctcaaaggccccatctgcaggaacatccaattggagaataagaactctgaacatggcttttggccaatatgaacactcagaccagggagcctgcatcatattttttatgtttttattgtgcaatttgttttataaaatgttttctctgatcccagtttataaattttcccagtatacagtctgtgttttatatttcatgcatagtgaactacataactaagggcaatgcatgtacatagaattgctgtattgcctggctgttatataactgtagttgtgatatcataattgaaccctctgacactgttagtcaattctttttttttttggagacagagtcttgccctgttacccaggctggagtgcaatggcatgatctcggctcactgcaacctacgcctccttggttcaaatgattcttctgcctcaccctccagagtagctgggattacaggtgcctaccaccgtgcccagctaatttttttgtatttttagtagagatggggtttcaccatgttggccaggctggtctccaactcctgaccccgtgatctgccctcctctgccccccaaagtgctgggattacaggcctgaaccaccgcatcctgtcgttagtcaattcttactccttataatgctgtgtatttacttgaactcatacatcagaaggtagtgatcttaaatgtatttcagttcttatagtgtgtgctggtggtaagtagaagttgtggcttttttcttaagagggaattgtttagaggtctgctggctgtataaatgtacttattatttcgttgctagtcttatcatgggttacaatattttattaattaatttttatgattttacataaggcttttcagtaagtggtatgcctgggaaacatggtgagacccccgtttctgcaaaaaatacaaaaattagctgggaatgatggcacatgcctgcagtatcaactactgtggagtctgcagtgggaggatggcttgagcctgggaggtcaagactatagtgagctgtaatcatgctactgcactccagcatggttgacagagcaagatgctgtctaaaaaagaatacttattgtaaagtttgggtacaggaataatgaagtcattgatagtttatgaacaggctatggagttgatgcccaaaagaaataaacagtttgtaaatgaataacttattttgagttgtgacaagacaatgttgaaagtgatgcatgaagcggcaggcagaccatccacatcagttttacagaaaaaaagttaatcttgttcgtgctgcagtgaagagaacagcaaacaggagaaacaatagtcaggaattcaataatagcctggttaacatgatgaaaccccgtctctactaaaaatacaaagattagctgggcacagtggtgggcacctgtaatcccagctactcaagaggctgaggcagaagaattgcttgaacccgggaggcggaagtttcgatgagccgggatcctgccgttgcactccagcctgggcaacaagagcaaacctctgtctaaaacaaacaaacaaaaaggtctagccccctctcctcctttgtctgccatcatggtgtgtgcttgactccacttcttgtcatgtcttctcacaagactttcaggattaagcggtttctggccaacaaccaaaagtaaaatcgtccgatttcccagtggattcgaatgaaaactggcaataaaatcaggtccaactttaaaaggagacattggagaagaaccaagctgggtctataaggaattgcacgtgagatggcacacatatttatgctgtgtgagcatcataatcacgttacttaagctgaaaatgtcactaccatctggagacttggacatgttttattgggaatatatttttttctctctgaatctgttatgaacgcattggttgggtgggttcagtaataaacatgtgagacctttcatttcaaaaaaaaaattttaatgacataatagattacctaaatttctgttttgctttgttttgttttttgagatggagactccactcggttcagtggatcgcacctgttgtcctggcactttgggaggctgaggtgggaggattgcctgagaccaggagtttcctgggaatcttctcatcttccctaacccagttcatgaaagacccttggactttactgttagggaaaaaatctatataaaacaatatcagcagctgggagtgatggctcatgcctgtaatcccaacactctgagaggccaaggcaggtgaatcacctgaggttaggagttcaacaacagcctgaccaacatggagaaactgtctgtattaaaaatacaaaattaggcagggtgcgatggctcacacctgtaatcccagcactttgggaggccgaggcgggcggatcacgaggtcgggagattgagaccatcctggctaacacggtgaaaccccgtctctactaacaatacaaaaaatgagccaggcgctgtggcaggggcctatagtcccagctactcgggaggctgagcagggagaatggcgtgaaccctggaggcagatcttgcagtgagccgagatagcaccactgcactctggcctgggcgaaagagtgagactccgtctcaaaaaataaataaataaataaataaaaatacaaatacaaaattaggcgggcatggtggcacatgcctgtgtaatcccagcgactcaggaggctgaggcaggagaactgcttgaacttgggaggcggaggttgctgtgagccaagatcacgccaatgcacaccagcctgggcaacaagagcaaaactccatctgaaaaaataaaaaacaatatcagtgtgtcaaagcattatgtctgtcacaatacttgtgaaaggaaaatcaaaattactaaccaaagagaaaagtcaagctgggaactgtgttagacaaacctgcctcccattttattcctaaacaatatagctacaaggactaaaccaaaaatctacatactccactcacaaactgtgggcctcaagatctccaccccaaaatagttctgttgaatttcaccctggcaatgtaaactgagagcttatcttcacaggtgtaggaaagaacccatccctctgcacacctgagtcaaatgtctgtctgactacttcccctgacctattttttatgtaaaaattcagggtcactgagccagcctaaggcataagtgactattcctccaccctctctcacatataaattgtgtattcaatgaaaggttgatcaaagactcaaacaatgtgatcatttgttatctccctgtgacctggaagcccgcaattccagttatttcaccttcccagatcgaaccaaggtgtatcttatatgtattgattgatgtctcatgtcaccctaaatttgtaaattgcagcctgaacatcttgggcacacgtcatcaggacctcctgaggctgtgtcatgggtgcattttaaccttggcaaaatagatttctaaattcattgagacctagtagatacttttggatcacaagctcatgaacacagaaaagatcaagatagaataaggaaaaaatgagtataatggaaagcacaaatcagttccaaaatctcaactccttcatatttattcaccatagggaaatgctttacaactttgtgggattagagtccatttgtgaaagattttatatatatatatatagtttgttttgttttgttttttgagacggagtttcaatcttgttgcccaggctggagtgcaatggtgcgatctcggatcactgaaacctctgcctcccaggtactacggattctcctgtctcagcaccccaagtagctcagattacaggcatgcatcaccatgcccggctaattcttttgtatttagtagagactgggtttcattatgttagtcaggctggtcttgaattcctgacctcaggtgatccacctgcctcagcctcccaaagtgctgagattacaggtatgcgccactatgctgggccaaaagatatatttctagtattagattgaaataaaaacccattctatataactttagctaatttaaaacgcaaataatagataattacatagatacacaaaactttataatatttcacttagtattgctattactatgttcttggggcagaagctcagtctgtcagatacattacaaaaggatggtgtctccataattgtgcttaggactctggtgcataagtggataaactgttaaacaggatcctaggggagctagggtgacaaagttcaagtccattaaaactagcaacatacattccttactgctcacgcatgactcatggtcttaagatgtttacagttaagaaaagcagcttaatcatacctgcaaggacaaactcctacataaacacaatgtccagatgacccaatatcccatgacaatgtatgcttctaagctaattacagtcatgctttcacgtacttgcacactaaaataccaaggataggtgtttttttttttttgatggagcttcacttttgtcatccaggctggagtgcaataggacaatctcggctcattgcaacttccaccttccgggttcaagcgattctcctgcctcagcctcctgagtagctaggattacaggcatgcaccaccacccccggctaatcgttgaattttcagtagagacggggtttcatcacgttcgcaaggctggtctcgaacccctgatctcaggtgatgcccccacgtcggccttccaaagtgccagaattacaggcgggagccaatgcaaccggccaaggatagctttaaatcaacaaagtaataagttttgttacactgtcagcccactggcaggtagacataccttagtttttacctaagcacctatgtaagagaaactttaagagaaggcagttccctttgtttttgaggtcgccctactgtgtaactggtagttttcttttttttttctttttttttttaagacggagtctcgctcaggcttgagacaccttgtccagctgtattttttattattattattattattattattattattattattattattattttgtttttgagactgagtttcactctagttccctgggctggagtacaatgtcatgatcatggctcaccacagcttccattttctgggctcaagcgattctcctgcctcagcctccggagtagctgggactacaggctcatgccaccactccaggctaatttttatatttgtagtagagacggggtttctctatattggtcaggctggtctcgaactcccgacctcaggccatccgccgtcctcagcctaccaaagggctgggattacaggcttgagccaccgcgcccggcctgaagtagaatattttagaaagtaattaaaccttttttcagcataataacccagagatgtacttctgaaggacttagaatctcttcttgaaaggcaagcaacaagggagatagtacctgtaagtcagtaggaaattaaatatttcaaacatcagctatttcaaatttaaagctacagacttttaaataattcggaaccttgagaggaacgtggtcatgcaacctgagtccggtggcatgcaggcgcaacttctacaagttttcctggccaggcatgcaggctcaggcctgtaatcccagcactctgggaggctgaggcgggcggatcgcctgacgtcaggaattagaaaccagcctggccaacatggggaaaccccgtctctactgaaaatacaaagccattagccgggcatggtggcgcacgcctgtattttcagctatttgggaggctgaggcaggagaactgcttgaacccaggacgtggaggtcgtagtgagccgagatcacatcactgcattccagcctgggcgacagagcaggacgccttcccaaaacaaaacaaaacaaaacaaaatgtgctatacaatttagtttcctaatatcaattttaaaaagttttcgtgtaaataattaggaaaactaagcagccccagagataagacctcctggcatcattgtcccttcttatggagtgataatgtaaccttccttgaagtgtatcactccatcaccagtcaagctgccgcagcctatgcactggacttgaatggaaaatgtggtggttctgggaaagcttctctgtatttccttgtgtgtgtgaaatgttaatgtctctacttgggaacgctgaccccattcatttggagttgaggtttccaggtggctattctcatgctttgtgtccaaataaactctataattaataatgtattctaaatttcattatttactgctgacatcagtttctgttggattgtaggagcctcaccagagagggcacctgtccgccatgctgtaaaactcacacttgccaaaaatacatgggttagggtttctccccctccctcaggatgatgctagttagctgacacagatggtcacctccattaccaagtagagccaggatgaattatgtgtgaccaagggtgttgtcaagtcctcttccctgaggactgatcagtgtttatcttgaaaacatgtatttgggttgtatagaacagtgaagtttctttctctcttttcaacctctcaactgtcctctatttcccatcacatgctggtctaaggcctatttattaataaaatagtttttatttctttctctgttatcgtcgtgaagatgatttctcatttaggggaagatttttttagttttcaattgtattttctcaacatttaagagcgaagtgaagagtatttcttgggccaggcacagtggttcacgcctgtaatcccagcatttcaggaggccgaggcaggcggatcacttgaagtcaggagttcgagaccagcctggccaacatggtgaaaccccgtctctacccaaaatacaaaaattagccgggcatggtggcctgtgcctgtaatgccagctattccggaggctgaggcaggagaatcgcttcaacccaggaggcagaggctgcagtgagccgagatgtcaccactgcactccagcctgagcgacagagaaatactccgtcttaaaaaaaaaaagaaaagaaaaaaaagaaagtaatagatctcttccacaaatgtgctgggacaattaactggatatccacatggaaaagaataatgttgtatccctatctcacacaatcaaaattttattttaaaaattaaaagagacgatgaggggagccctgcgggagggtgtgttactttgtcgcccaggctggcctggacccccaggctcagtgatcctcccgcctctggccctcaggctcccgcccacctggccgcattcctgctatgtttaagcagtaggtggtgacttcactcctccctggcctgaacactccgtcgcgcatcccaggcggaggccctagggaagtctctgaagctgagcacagggtggactctccctcctgagtgaatggagaatagaaagggagaggatttctgttctgttctgtgggccgtcagcatgaaattgtacgttccgcccaggcagggctttgcattttacattcttgtttgcatccccgttccagacaattccagggctttcgaatcgtgcttcagccttcctgaccgctctcgcctccaaagcccgaaaaatagagtcgctgggagcgaggctgagagacgcacaggtcccgccccggccccgccctctgccggttctaaagggcaaggtctctccgcctggggccccgcctctacctcgatcaggccccgcccaccttctcgttggctccacccaggcctggctttagtcctgtgcgcacacatccgcgcagaccaggaagcggatcccgtggagtgaaggtcgcaccgcggcggtgagttttgctctgtgttgtattaagtctgcactccccatatccccggcacttccgtacctgggacgtggggtcaccacagacctgtaaattctcgcccatcttccttcaaccagagcaaatgcagacgttcccctgggaatccggaagtcgcttccttttgtgtttaaagtcgccctgaggctgttcccgtctccagtctttctgctacagggcgctgtatacacttcctatcgcgtagtttctgtgctcaaaaccgttttttaactcctccctccccgcgcttttcaaagtcctcacccgagatgtgtatttccgcctgggcgcctcccagtctcaacctttaggcgcctgaagcgcaaacgtcgcgatcccagtctcagggaggccgagttctctgcctggtgctgggatcttgtggaccccaccgaaggcgtcgtcgcaccccacctcccgcctcatgctgggccttgctgcaccccaagtctccccttagcagtcaccactttccttgagccagcgttggggaggtgccaggggccagtcctgtgacacggtgtgttcttgcctgcctagctccaacccctgaaaaatgagcctctctgggatgcaggcgtcttacttcaaaccctcctgtgattgtgtgggctaaagagatcaggagacagagagtagtagaaaacctgagacagagaaaagaagaatgagaaagacccataacagatggcaaagtagaggatgggtgagggatttgccaagagacagcaaaagtgaaaaaaaaaagataagaaagcaggaggagaaaagcaactggagaaatgtagagaaaagctagatgtacagagagatgaaggacagacagcaaggtagagaggggcagcaaagagggaggctcatcagagtgagagagagagagagagagaggaggaatttggagccagggcagacagagcagagtggtgctggtggcaaggagaacagagggagaaccacagcagggaggacgcctggggatctggggtgctagagagtggggacggggggtaaaacagagaagagagaatttaacagggagagcggcagagatgcagagatgggataagaggcggaaatatatggagattgaggacgatcgaagaattggggagaaggagcaacaagagattaaataagacgtgaggatggagcccaggtaatttttgtatttttagtagagacggggtttcaccatgttggccaggctggtctcgaactcctgacctcaggtgatccacccgcctcgacctcccaaagtgttggaattacaggcgtgagccaccgcacctggccacccaagcattcttgattgaaaaagtttgcttatgtcttagttctacagctgaccctctttccctgctttttgtttgtttgtttgcttgtttgttttgagatgcactttcgctcttgttgcccaggctggagtgcaatggtgtgatcttgggtcaccgcaaccctttttggttttttttttgagacggagtttcgctcttgttgcccgtgctggagtgcaatggtgcgatctcggctcactgcaacctccacctcccgagttcaagcgagtctcctgcctcagcctccctagtagctgggattacaggcatgtgccaccacaccaggctaattttgtatttttagtagagatggggtttctccatattggtcaggttggtcttgaactcctgacctcaggtgatctgcccacctcggcttcccaaagtgctgggattataggcatgagccaccgagcccggcctactcaccaccacctttacctcccggttttaagcgattgtcctgcctcggccttcctgagtagctggaattacaggcaagtgccacaacatctagataatttttgtatttttagtagagatggggtttctccatgttggtcaggatggtctcgaactcccgacatcaggtgatccgcctgcctcggcctcccaaagtgctgggattacaggtgtgagccaccgcactcagcctccctgttttgaaggtaactagctgtgtctttgtacatctgcattttataaatgttactgtaattttcttgtgaggaagaattaaatgttgggaatcagtggcatcagaacttgcaaaggaagtttctttatcccaggtatgtgaaagaggcttctctaattttcaaggatagttttgataaggccaaccctttcctttatcccttccaggccaccatgtaagaattccgttacatcttttcactcatctcagaccttctcagcgtgactcggtgaaaatgtccccgttctgaggatgtcacagctaaatctaaagcagatcatgtcagtccctggcagggaaccctccatgggcttcctgtgttccccaggacaaaagcccaactcctcactgtcactccacagccctgtgtccagggcccctgccactgtccaggctcctcctgggaacttgccctcatctcatgactccctctgccccagtcacatttgcttttctcttttcccaaacatcaaaacccttcccgtctcaggtcattttcactgctcttaccctatttctctaaatgctcacagcactgtccctttctccttcaggtcctggctcagaaatgtctcccatgccctcccacccccaactgaatttccctctgcccatcagtctctatcacattactcaggttttattatctctgtgtcagtcacatcagaaacacactttttttctttttccaaagagtctcgctctgtcctccaggctgtgagtgcagtcttgtgatcttggctcactgcaacctttgtctcctgagttcaagcaattcttgtgccttagtctcccaagtagctgagattacaggtgtgtgccaccatactctgctaatttttgtatttgtattttattttatttttgagtcttactctgttgccctggctggagtccagtggtgcgatcttggctcactgcaacctccaccttccaggttcaagcgatcctccaacctcagcctcccgagtagctgggcttaccaatgcccaccaagcccagctactttttgtatttttagtagatatggggtttcaccatgttggccaggctgctgttgaactcctgaacttgagtaatcctcccacctcagccttccagagtgctagtattacaggcatgaaccaccgcacccagccccaatttttgtgtttttagtacagacaggttttcaccatggtggccaggctggtctcaaactcctgagctctactgatcctccccctcagcttcctaagtagctgggaccagagacacacagacgtgcaccaccatacctggctaagtttttgtatttttggtagagatggggtttcaccatgttgcccaggctggtctcaaactcctgagctcaagcgatgtacccaccttggcttcccagagcggtgggatgacaggcatgagccaccgcaccgagcctctgcatgggatttggtcagggctgggtctgtgccctgaaagggagctcattccagcccagctccccactgctgcagcgtgtgagggcttctccaggagggaagcgagagttttcttatagaaatttattatccctggtgcagtgggcagcagaggtgaccatattttttcagagtgagggcacctttgtatgtgtcattgtgttacaggcaggaggtgtgttgattctgagcagtaaacaacatatttctaacattcaggattgacttctaaagacttggtacgtgaggaaaaaacacggaagaggaagaggaaagcaaaggagtcagggatggctcttcttcaggtgagatgatattctcgggggattgttctgtctccttcctttcagaaatgctgatcttggagttgggaatcttctctgagtctcaagtgtcctgcctgacaggtttgctcacactcaactcatgccttccctcagtccctgtcatctcacttagattccatctcttgtgactgagtgacatgaacttgggaagaggctgcactgggcatggtcctgggaagggctcacacccagacatgtatggagatggggtgagggtcccgcagtgtcagtgctgttgggcagcagggattgttcaggggccacatctggatgcactgtcaactctctgtggaccaggattagagcagctgccaatggaagtgacctattaatgtgcacaaagtacgtggtaaattctagaaaaggagaccaataagggaaaatcttttctccctaattttataccacatttttaggtaattgagtgagttactgtgtttctgactcaaaaaattgtactaattagaatggaaagttcataaacagacatgaatgatacaggggttttattccatccttatttaaagaatatgaaatcaacctaaataatagcaggagatttattaaaccattcttagcaaattaagctgatggagacagtggtgttactgtggagaggcttttgaaacaggtgttttttgtaaaaatggttacaatttttctcaaatatgggagcagtacttgcagctgccaaattatccttttccaccaagatgagattcctcttcagttaaacaaaatttgcatatatatatatatttgtgtttgtttgtttgttttttcgagacggagtctcgctctgttgcccaggctgtagtgcagtggcacgatctccgctcactggaagctccgcctcccaggtttacaccattctcctgcctcagcctcctgagtagctgggactacaggcaccccccaccacgcccggataatttttgtattttttagtagagacggggtttcaccgtgttagccaggatggtctcgatctcctgaccttgtgatccacccgcctcagccccccaaagtgctgggattacaggcatgagccactgtgcctggcctactttttgtatttttaaaacctttatatatatacacacaaccccatacatatacacacacatatatacatacacatacatatatacacacacacatatgtatatattttgaaaatctgagacaaatgacaacactttgtattaacgtggttttttgtgagtgtgtgtaggttttattttttttttaacatatacaaaatagaattttgtacttcgattaattttattttcatgtattttattttattttgagagagagtcttgctttgttgcccaggctagaatgccttggtgcaatcgcagctcactgaaacctccaccatcaaggtcaagccgtcctcccacctcagccttccaagtagttgggacaacagatgcctgccaccatacccggctaattatttatttctaacgtaagcaattcatactgagagggtatcctgagctcttcagaaagtataatcaaacaccactgggaagacatcatgtggtgaagaatcccttacttggatttgtcggaacattctctgcaattaaatccatgctttcccctctcctcttctcattttctgtaaagataagatctcctcccataaccatttgcttaaaatgtgttttcctttcagggtctactgacattcagggatgtggccatagaattctctcaggaggagtggaaatgcctggaccctgctcagaggactctatacagagacgtgatgctggagaattataggaacctggtctccctgggtgaggataacttccctccagaagtggggatgtgcccttgtggatctttgtattttctcttgttgcctcttgggagccacatccttgcttggctaaaatggaagccgtattgagttagaaatgaaaagcttcatgatgtagcatctggactttcactgtcccctttagatgttctgcattcttcatgatagctcagtgggggttccagaagtaaagtaagcataaaagcttatggcaggccaggcgtggtggctcacacctgtcatcacagcactttgggaggctgaggcgtgtggatcacttcaggtcaggagttcaagaccagcctggccaacatggagaaatcccgtctctactaaaaacacaaaaattagccgggcgtcgtggtgcatgcctgtaatcccagctcctagaaaggctgatgaaagagaatcgcttgatcccggcaggccaaggttccagtgactgagaacacaccactggactccagcctgggcaacagagcaagactctctctcaaaaaacaaaaaaacaaaaccttatggcagactttaatcatatccagtttcctgtttgcttttcctgtgctttcgattcagtagttcttggaagagagcttgatgtccacatattacatgttacagtgctctccaagcattcagaaggaggcagtcagtggagcaattagtaaaatattttcctagatccacctgtaatgtcttctttcctacagaaatatagggctgggactctacaaaagctccagcacgtcttagtactttctttttataagcaggagtctcatgctgatatgttatctccatgttggagcaagagaaagggccctggactgtggagagtgaagtgaaaatatcaaaaaactccagatgggtgggaatgtattataggtgtaaatgcaggtaagagctcagatgggcagagtggaagctccaccttcaaatagtgtgtggggaaactctgcaagtgggagaattctgttggaaaaggaaagtttcaatcctgagatctctgaaatgacatctttctttgcccccacttatccctctgctcttcctttctttctttttcttattttatgaaagagtctcactgtgttgcccaggctacagtgcagtgatacgatcttggctaacagcagcctccacctcccaggctcaaaggatttttgtgtcccagcttcctgagtagctgggactgtaggcgctcaccaccatgcccagctaatttttgtgtttttagtagagacagggtttcaccatgttggccagcctggtctcaaactcctgatctcaagtgatccacctgccttggcttcccaaagtgtggacctaagattacctaggtgccaaggcaagagactgaaggcacaaagtgtttcagtataataaagaaaatagttacaataagaagagtcataatacaaattagatacagagatgatcatggacaattatcaatcattagcttttaatattactctttgttgcattattaatataacctaggaataactggcaggtatagggtgaggtgctgaagggacatggtgagaagtgacctagaaggcaagaggtgagccctctgtcacacccgcataagggccgcttgaggggtccttggtcaagcggtaacaccagtgtctgggaaggcacccgttacttagcagaccgcgaaagggggtctcctttccttggaggagtcagggaacactctgctccaccagcttctcgtggaaggctggatagtatccaggcctgcccgcagtcatccggaggcctaaacccctccctgtggtgctgtgcttcaatggtcatgctccttgtctactttcatgctcctcccgtactcctggctcctctttgaagttcatagtagatagcggtagaaggaatagtgaaagtctttgatctttcttagaagtgcatagaagagccgggcgcagtggctcttgcctgtaatcccagcactttaggggtccaaggcgggcagatcaagaggtcaggagatcgagaccatcctggctaacatggtgaaaccccgtctctactaaaaatacaacaaattagctgggtgtggtggcgggcacttgtagtcccagctactcgggaggctgaggcaggagaatggcatgaacccgggaggcagagcttgcagtgagccgagatcgcaccactgcactccagcctgggcgacagagtgagactccgtctcaaaaaaaaaaaaaaaaaaaaaaaaagaagtgtatagaagaaaacgctaacgtatgctgccttctctctctgctttggctacctaaaaggcaagggccccttgtcctatgatcacgtgacttgcttcaccttatcaatcacttagaagattcaccctccttaccctgcccccttgtcttgtatgcaataaatatcagcgcacccagctgtttggggccactacctgtctccgcgtcttgatggtagtggtcccccaggcccagctgctttctctttatctctttgtcttatgtctttatttattacaatctctcatctccgcataagagaacacccgctaagcccgcagggctggaccctacaccaaagcgctgcgattacaggcgtgagccgccaagctcaactattgttattattttaaacagttttgtcttttagttctttgtaaacatgtaaatggtttaaacatgattccagtgtgaatataacaactacgttagcgtccatttcttttatttttgttgaaacggagtcttgctctgtcgcccaggctggagtgcagtggtgcgatctcggctcactgcaagctccacctcccgggttcacgccattctcctgcctcagcctcccgagtacctgggactacaggctcccgccaccgcgcctggctaatttttttgtatttttattagagacagggtttcaccgtggtctcaatctcctgacctcgtgatccacccgccttagcctcccaatgtgctgggattacagacgtgagccaccgcgccccgccgtgcccatttctttcagtaaacagaaatgaagtgtgttgtatagataaaataaaaaggcatgaaaaaaacactgtacatatatgttaccagaaatgcaacatacacagaaataattccgacaaaaataaaaaaagttctagaggagaagtagttttgggaagtggttattgttgcaggtatgttaaagatcttaaagttggccaggcgcggtggctcacgcctgtaatcccagcactttgggaggccaaggcgggtggatcacctgaggtcaggagttcaagaccagtctcaacatggagaaaccccgtctctactaaaaatacaaaattagccgggtgtggtggcgggcacttgtaatcccagctactcgcgaggctgaggcagaattgcttgaacctgggaggcgggggttgcagtgatccgagattgtgccattgcactccagcctgggcaacgagagcgaaactctgtctcaaaaaaaaaaaaaaaaaaaaaaaaatcttaaagttatagcataataatgaaacctaaaattttcataacctggccaggtgtagtggctcatgcctataatcccagtaatttgggaggctgaggtgggcagatcaccagaggtcaggtattcaaatccagcctagttaacatggtgaaacttcgtctctagtaaaattacaaaaattatccaggcacggtcgtgggtggcagtaatcccagctactcaggaggctgaggcacgagagttgcttgaacccgggaggtagaggttgcagtgagctgagatcgcaccgtcgcactccagcatgggagacagagtgagactccatctcaaaataaataaataaataaataaataaataaagtttcataacctgcaaaaactacttctcctctagaattattattattatttttttagatggagtctcgctctgtagcccaggctggagtgcagtggcacgatctcagctcactgcaagctccacctcccggggtcacaccattctcctgcctcagcctcccgagcagctggggctacaggcgcctgccaccacacccggctattttttattgtatttttagtagagatggggtttctctgtattagccaggatggtctcaatctcctgaccttgtgatccatccacctcggcctcccagagtgctgggattacaggcgtgagccaccgcgcccagcctttttagaaatttttatttttgtcagaattatttctgtgtatgttgcatttctgctaacgtatatatacagtgttttttcatgcctttttattttaaaaaatttagttctgaactgggattacaggtacccaccaccgtgcccagctaatgtttttgtatttttagtagatatggggttgcaccatgttggccaggctggtgtcgaacttctgacctcatgattcacctgcctcagacccccaaagtgctgggattacaggcatgtgccaccgtgcccggacattagtcaattcttattccttatagtgctgtgtatagttttgacctcatacatcagaaagtagtgaccttaacatgtatttcaattcttatgttgtgtactagtggtaagtacaagttgtggcttttttcttaatagggaattgtttacaattctgcaggctgcatacatgtacttattattttctggcttgttttatcaagccagaaaatatttatcaatattttattaactgatttttatgactttacctgtgagttttcagtatgtgatatgcaatataactgacacactccactcgttactgtcacaaagtgctgctgggcacagtggctcatgcctgtaatcccaggacttcgggaggctgagacatgtggatcacctgaggtcaggtgtttgagacaaacctggccaatatggtgaaaccccatctctactaaaaatataaaaattagccgggcatgatggtgcatgcctgtaatcccagctactcaggaggctgagcaaagagacttgcttgaacccaggaggcagaggctgcagtgagccaagatcatgccattgcactctgtccagtgacagagtgagactccatctcaaaaaaataaaaatacaaaatttttaaaaaaaagtcacaaagtgcctgttccacatggatatagataattttgtaacagttatttagaaaaatacggtgttaacatttttctttttgagaggtagtctcactctgccactcagggtggagtgcagtggcacaatctcagctcaccacaatcttggcctcgcgggttcaagcaattctccttccttagcctcccaagtagcttggattacaggtgcccaccaccacacctggctactttttgtatgtttagtagagaagaggttttgccatgttggccaggctggtctcgaactcctgacctcaggtgatttgcctgtctcggcctcctaaaatactgggattacaggcgtgaaccaccatgccctgccttgtttctttagagatggagtctcactttgtcacccaggctggagtgcagtggttcgatgttggcgcactgcaacctttgcctcttggcttaaagcaattcttgtgcatcagccgcttgagtagctgggactttataaaggcgtgggccaccacacctgcctaatttttgtaatattttcttatcttctcagtgctatgattctttgacaatacagaaattccattgattttgattatccttacaggagcttgttgtggattatttaccaaaatagtaccttgtctggttttttagcatttatttatttacactaagtaccctataaatatgaagaatatatatttttctcttctttgatgtgacagtgatacgtcttttgcaaagtgtgatacactttagggtcacagtagaaaaacactcctgactttaggcttacacatgtttgtgccctgtcagtgtttcgtcatgatattggaaataggcttccataaaaatgatttgaagcacatgcaatcaccctttatttattaaaggatcttactccttttgtgttcctaaactttgaagatcatgtttgggaagtttaaaataagtattgttttttatgtaatatttacacatttcagtattgtataacttccgtacttaatttgaaacctatttgtgtttatattttgtagatacctcttccaaatgcatgatgaagatgttctcatcaacaggacaaggcaatacagaagtggtccacacagggacattgcaaatacatgcaagtcatcacattggagatacttgcttccaggaaattgagaaagatattcatgactttgtgtttcagtggcaagaaaatgaaacaaatggccatgaagcactcatgacaaaaaccaaaaagttgatgagtagtacagagcgacatgatcaaaggcatgctggaaacaaacctattaaaaatgagcttggatcaagctttcattcgcatctgcctgaagtgcacatatttcaccccgaagggaaaattggtaatcaagttgagaaggctatcaacgatgctttctcagtttcagcatcccaacgaatttcctgtaggccaaaaactcgtatttctaataagtataggaataatttcctccagtcttcattactcacacaaaaacgggaagtacacacaagagaaaaatctttccaacgtaatgagagtggcaaagcctttaatggtagctcactcttaaaaaaacatcagataatccatttaggagacaaacagtataaatgtgatgtatgcggcaaggactttcatcagaagcgataccttgcatgccatagatgtcacactggtgagaatccttacacgtgtaatgagtgtggcaagacattcagtcacaattcagccctgttagttcacaaggcaattcatactggagagaaaccttacaagtgtaatgaatgtggcaaggtttttaatcaacaatcaaaccttgcacgtcatcatagagttcatactggagagaaaccttacaaatgtgaagaatgtgacaaagttttcagtcgcaaatcacaccttgaaagacataggagaattcacactggagagaaaccatacaaatgtaaggtttgtgacaaggctttcagacgtgattcacacctggcacaacatactgtaattcacactggagagaaaccttacaagtgtaatgagtgtggcaagacctttgttcaaaattcatctcttgtaatgcataaggtcattcatactggagagaaacgttacaagtgtaatgaatgtggcaaggtttttaatcacaaatcaaaccttgcatgtcatcgtagacttcatactggagagaaaccttacaagtgtaatgaatgtggcaaggtttttaatcgaaaatcaaaccttgaacgtcatcatagacttcatactggaaagaaatcttagaagtgtaaatttgcaaggtttttaggcaacagtcaaaccttgcatgtcatcatagactttatactggagagaaaccttacaaatgtgaagaatgtgacaaaagttttcaatttcaaatcactccttgaaatacataggagagttcatactggagagaaaccatacaaatgtaaggtttgtgacaaggatttcgggtgtgattcacacctggcccaacatactggaattcacactggaaaggaactgtacaagtgtaatgagtgtggcagagcctttggtggtcagtcaacacttactcaccatcaagcaatccatggtatagggaaacttgactaatgtaatgattgtcacaaagtcttcagtaatattacagccattgcaaaacattggagaatccataatgaaggaggtcttacaagtgtaataaatgtggcaagtttttcagacatcattcataacttgcagttcattggcgatcttatacaggagagaaatcttacaaatgtgatgattgtggcaaggtcttcagtcaagcttcatcttttgcaaaacgggagaattcatacaggagagaaacctcacaagtgtgatgattgtgagcaaagcctttacttcacgttcacaccacattagatatcagaggatccatactggacagaaatcttacaaacgtcctatgtgtggcaaggtcttcagtccgaggttactccttgcagaatatcataacgttcatttttgaggtaatagttacaaatgcggtgagcacagcaaaccatcaaggattgacagtagagtcaattcagaattgacttgagtttgagttgacttaaaacattcagttgaagcattaattgacattaaagtgtttatgttaagaggattgggccaggcgtgtggctcacgcctgtaaatccagcactttaggagcccaaggtggatagatcacttgaggtcatgagtttgagatcagcctggccaacagacgtgagtcacttttcccagcctgctttttgtttctttaacaaaaaccaataggggtttttataggtattgtgttgaatctgaatcacattggcttatataataacaatattgatttttccaaaccatcaatgtgggttgtatatatatgtttttaatcattttggttaatgtttgtagatttcaaggtgtgaaattctcagtttttttatgtttattcctaagtatttcttactttaagatctctagcaaatggaagtgttttttaattttcgtttaaattttttattgtttatggaaattcaattaatttttggtgctgctattgcattgtgcaaatccactgaatgtgttgattagttccagtagtattttggttgactcaggccccgcccacctcttcgcctcccgtctggcctgacccaggccccgcccacctcctcgggggtctccccgcgggtctggcttctgtactgtgctgattggcacagacccggaagctgatggcatggactgaaggttgccccgttgagtttgcgcttcccagttctctggtactgctataccggggacgtgggtgtctccacagacctggaaattccggcccctctttctcaactcagagcaaattgagacgtccgggtgggagtccgtgagtcttttccttttgagtttaaagtcgccctgaggctggtcccgtcccggtcttttctgcagtagggccgtgcagacacctcctgtagcgaaactttccttctcaaaacccttcccgacccgtcctcccgcctcgcgctgtttcaggtcctcaccagcgagttggactctcgccctgggctcctcatcggcgcctggagggcagcgctgcagccccactcccgggaaggccgcgtcctctgcctggtcctgggatcctgcagaccccacccctgtccgaaggcgccatcgcccaccacctccctcctcgtgccggccctgcttctccccagttccaaccccaggaaaacgtgcttctcctggaggcaaccctctttttccaccctcgccctgttgttcccggaaggcaggcctggaatgtgaagtttccaggtagatggatattaaacatagaattgaagaaaaaaaaaaaaaccccacaaagtaacaaaagaatgaagcggcgaaagcagaaatttactcaaccaagaaagcaccccacagggtgggggtgggcccaagcgagcgtctccagggccccatttacaaagtttttggaggttatttttttttgaggtccctatgggctaccccttatctggatgaagaatttggcccttggccaaggaaataactgaggtaaattggcctgaggccagagcagatgggtgccctatgcagatgaaggggtggccggtgcttggccttggccactcctgggctctttctctttccacctgcgacctggtggaagggggagggtgttagggagagtagcctttgatcctttgttactttgggtgggaagatggggtttttccttttagtctagttttggaaagttcgcgttaattggttttagattccctgcctccctagacccaggacccatgtggttttttttgtttttgtttttgtttttttgatggagatggggtcttactctgctgcgcaggccgaagagcggtgaccggatcacagctcactgcagcttcaacctcctgggctcaagggatcctcccacctcagcctgcagagtagctgggaccacagccgcgcgccaccacaccgcgccaatttttgtgttcttggtagagaccgggttttgccttgttgtctaggttgggctccaactgcagggctaaagcgatccaagagcatcagcctcccaaagtgctgggattacaggcttgagccaccatgcccgccttatttcttaatttaaaaaaaaaaatgtatatgtagactgaacgcggtggctcatgcctgtcatcccagcactttgtgaggccgattctcctctatccaggagacgggtttcaccattttgccaggtttgtctcaaactcctcggcttaactgatccgcttgctttggccttccaaagtgctaggattacaggagtgagccaccacacgtagccagtcctggcattttgtagaaggatggccaacgcagcctgttgacccttcctggccatcacatgaaaatcagcgactcttccttcttacaaaactcggagcttctcaggataacttggtgaaacgtcccccgctgtgaacctcagtgagcccacctgtaatatacaggtgagggagaagaccagaaaagctcagtcagagtgacactgacccctgaaatgatgggcacaatggagtgtgtggcttttcctgtaggacagggaggtatttagttgtagtttgaactttaaaggattccagtcctccgaaaaacaggattagactcaaatcaccttgaaccttatcatctcatggctttgacccacctacatggctccgtgtcccctgcaggcctcgccccggagctctacaatcctgtgtgcagttgtctccgcagctctctgctgggacatcaaacaggcatctccaccttcatgtgtctataagtgacttcctaaacccccaaacacattcccttacagtcctacacatctcagatgagggtgacagtgtacttctgggtgcttagctgaggttgacaccatgtattttaaatatggaaaataaattacattatttgtaagtgttgtaatttataatgtaaagagaaaattacatgtatacatgaaaggagtgagaaagtacatcatttccaaatttattttgaggtgtgggagaaaaatgtttcaaggcctcatccttagggatctgtgctcccgggacccctctgacttcatctcctgcctgtgtcctcctcactccctctgctccagccatacaggcctctttcctttttctgggactgaggttgctcctatctcagggacttctcctgggctgtccctctgcctaggactctctggcccctcaactgcaagtgacaagcagcctttcttccctaagtctttgttctgatattactttctctatggaaacctttgtgatctcccacagccccccacttgacattgcagcgccaccttcacccccacctctggtccatgttgcctgttctgtgtgattcttttagctccttcaccgttcactggatcctggtgagaacaagtccgtaagcggagagcagaatcagaaggtggggctgtgctgggctggcgccatctgagtggagctcaaccctgacttcacattacagttttcaggcattttgcaaatatatcttttgttctgttttatcaaagattgctattatcataggatgggacacaccctcaataatacaatggcactggtgattctcatctgtgtccagcattgaacatcaaggcagtttcctccatattgagaactgagatcagcctgtgatccacagggaggtgagggggctgtgctctgcatggggtttggttagggccagatctgtgtcctgaagatctgtgtcttgctgcatcgtgtgcgtggacttttccatcaggggagcaaaatccaaaaacaagtcaaaattacccttgtaggtcttcctgtgggatgtccttatgtctgcataatctctggtgcagtgggcagcagaggaccatctttgtccctggtgaggtctcccctgtgtgtgtgttttgtcacaggaaaggagggagtgatttctaaacactaaatctcagctgggtgcagtggctcacatctggaatcccagctctttgggagggttgggtgggcagatctcaaggtcaggagatcgagaccatcctggccaacatggtaaaaccccatctctagtaaaaatagaaaaattagctgggcctggcagcgcatgcctgtaatcccagctacttaagaggctgaggcaggagaatcactagaaccagggaggcagaggttgcagtgagctgaggtcatgccactgaaccacattcttgtgacagagctagacaccatctcaaaaaaaaaaaaaagaaaaattaaatctcatatttttttacacacaggattgatttccaaagactcatgctatgtaaggaagccaccaagaagggcaaagaaaaggagccagggacggctcttcctcaggtaaagtgatattcctcggtggattcttctgtctccttgttttcttaaataccaggtattgtggtagccagtcttctgtgattctgaagcgtcctaactcacaagtttgctcgcactcacccatgccttttctcagtccctctcatcttaaattccatctgcctctattgcccaggctggagttcactggagcaatctgggctcactgcaacctccacctcccagggtcaagcgattctcatgcctcagcctctcaagtatctgggattacaggtgtccaccaccaggcttggctaattttgtattttttgtagagacaggttttcaccctgttggccaggctggtctcaaacccctgacttcatgtaatctccttgacggtttttcactgttaccaagaataacacactggctgcctgtgagcatggtgacttcactgcagatatctggagaattcctgcaaaactgattacttctttttggatttgctatttcctcttttacatctgggaagattccatccagacccccagctgcagaggtgccctctctgactgagaacatgagaaatttctcactcttttaagcaaatcttactcctgtggtcttaccaccatgttcttttttgcattcggtgaaaatgaaagccctttttatttatattttctattccttgagagtctgagtagatgtcattaatcatggacttgtatatttaaaatagattttaatactttgctgagcatacttttcatgtgttttgagagctattttgtattctttagttctttatttttgccctggtgttttgttcacattatgcatttttttaggataaaacagaaacgttctttcacatgcctgctttttttttttttcttttaagacggagttttgctcttgtcacccaggctggagtgtaatggcacgatcttggctgactgcagcctccacctcccgggttcaagcagtttttctgcctcagcctcccgagtagctgggatgacaggcaggtgccaccactcccagctaagttttgtatttttaagagagatggtgtttcaccatgatggccataatttcttttggcttctgaaattagaaatttttggccattaatatcttccaacaggcttttctattcctttcttcctctcactgtcttctgggacttctggtactttaaaaaaatttttttgagatgaagtcttgctctgttgccaggctggagtgcagtggtgcaaactcagctcacctccagcctttgtcacctgggtttaagtgattctcttacctcagcttcacaagtagctgagattacaagtgcgcaccactacacctgcctaattgttatatttttcatacagacagggtttctctatgttggtcaggctggtctcgatctcccgacctcaggtgatccacccaccttggcctcccaaagtgcagggatttcaggcatgagccaccgtgcctggcctgttttttttattgtttttttttttttgagacagtcttgctctgttgcccaggctggagtacagtggggcgatctcagctcactgcaacctctgcctcccatgctcaagtgcttctcctgcctcagcctctagagtagctgggactacaggagctcaccaccacaaccagctaatctttgtattttcagtagagacagggttttgccataatgaccaggctgttctgcaaactcctgacctcaggtgatccacccacctcggctttcaagtcctggtgtgagccaccttgccagtcccctcttcactaatttttaatttacataatgaattctgattttgaacccatgtattgagtttttctacttagttactgtatgtttagccctagggtttctgtgtagttcttcataatttccatacgttggttgaccttctcattttcttcatgcattgcttttatgatttcttgaagctgtctcttaactcaatgagtttccaacattgtttgggttggaggtgatggggtctcactgtgtccctcaggctggaggacagtggtacaatcttgggtcactttatcctctgctctccaggctcaagcgatcctcccacctcagcctggcatgtatctgtggatgtgtcctctctaggtttttgcttataatctcctaactgaagttaatttaagtgtgtgtgggtgtgatttgtagtgtgtacaggagagcattaatggagaagcctatgattttttgtttgtttgttttttgagacagtctcattctgtcatcaggctaaagtgcagtggcgccatctaggctcacttcaacctccacctcctgatttcaaaagattctcctgcctcgccctgctgagtagctgggactacaggcacgcaccaccatgcccagctaatttttgtatttttaatagagacggggttttaccatgttggccaggatgctcttgatttcttgacctcctgatccacccatctcggcctccataagtgctgggattataggtgtgagccaccacgcctggccaagcccatgttttatgtagaaaatacattattttcagtatatatatacatatattttattttgagagtctcactctgttgcccaggctggagtgcagtggtgcgatctcggcttacagcaacttctgcctccagagttctatcgatttttctgcctcagcttcccaaatagctgggattacaggcgctttcccccaccgtgcctagcaaatttttatatttttagtagatacaggttttcaccatgttggccaggttgttcttgaactcctgaccttaagtaatccacccaccttggtttcccaaagtgatgggattacaggtgtgagccccaatgcccggccatatatatatatagtttgtttgttttttgacagagtctaactctgcagcccaagctgagttgcagtggcacaatctcagctcactgcaaccttcgcctctggggctcaagcaattctcctgcctcagcctcccaagtacctgggattagaggtgggcaccaccacacctgtgttcaagcaattctcctgcctcagccttcaagtagctgggattacaggcaggtgccaccacgcccagctaagttttgtacttttagtagagatggggtttcaccatgttaccctggatggtctcaaactcctcaagtcaggtgatccacctgccttggcctcccaaagtactgggattccaggcctgaggcactgcacctggccatatattttttatattgtccataaaactgagacttccacagtgacttaggggattttaaaatctatcaaggaaaagtgcaataaaatgcaactatacagaaaaaactgttcaaaaataccttaatgcggctttgtcagaacaccgtcttggatcaaatcgatacttattttctcttttctcatttcatgtgaaggtgatgactcactcctccctaatgttttgttgaaatctgtctttcattttagggacactagactttcagggatgtggctatagatttctctttggaggagtggaaatgcctgaaccctgcacagagggctttatacagggaagtgatgttggagaactacaggaacctggagtttgtgggtgaggaaaatatccctccagacatgaggaatctgcccttgtctatcttggctcttcctggttttgtattctcttttgtgatgttgccccatacatgcttttcatgtacatgtcattgttttctacagtgatgaccctcatatttgtcatggacagcttcttagagactcccttatggagtggttttacataaaaccagaaaattcatgaagaacactttgactaataagattgaacatcatcctgctctaggcagagatgcccctggaggccctgagcggaattgtcaccatggcccaggatatgagatagaaagcatcacactgactgacaagtgtttccagctgcgcttgtggttttgtgttttttgtttcattttgtttttatgagacagagtgttgaacaggttggagtgcagtgtcgtgatctcagctcattgcaacctccaccttctgggctcaagcaattcacatacctgagcctcccaacctaactgaaattacagatgcatgtcaccatacctggctaattttgtattttttttatttttattttatttttattttttttattgatcattcttgggtgtttctcacagagggggatttggcagggtcacaggacaatagtggagggaaggtcagcagataaacaagtgaacaaaggtctctggttttcctaggcagaggaccctgcggccttccgcagtgtttgtgtccctgggtacctgagattagggagtggtgatgactcttaaggagcatgctgccttcaagcatctgtttaacaaagcacatcttgcaccacccttaatccattcaaccctgagtggatacagcacatgtttcagagagcacagggttgggggtaaggtcaccgataaacaggatcccaaggcagaagaatttttcttagtacagaacaaaatgaaaagtctcccatgtctacctctttctacacagacaccacaaccatccgatttctcaatcttttccccacctttcccccctttctattctacaaaaccgccattgtcatcatggcccgttctcaatgagctgttgggtacacctcccagacagggtggtggctgggcagaggggctcctcacttcccagtaggcgcggccgggcagaggcgcccctcacctcccggatggggcggctggcctggcggggggctgacccccccacctccctcccggagggagcggctggccgggcagaggggctcctcacttcccagtaggggcggctgggtagaggcgcccctcacctgccagatggggtggctggccgggcggggggctgacccccccacctccctccgggacgaggtggctgccgggaggagacgctcctcacttcccagacggggtggctgctgggcggaggggcttctcacttctcagacggggcggctgccgggcggaggggcttctcacttatcagacggggtggctgccaggcagagggtctcctcacttctcagacggggcggccgggcagagacgctcctcacatcccagacggggtggcagggcagaggtgctccccacatctcagacgatgggcggccgggcagagacgctcctcactttccagactggacagccaggcagaggggctcctcacatcccagacgatgggcggccaggcagagacgctcctcacttcccagatggggtggtggccgggcagaggctgcaatctcggcactttgggaggccaaggcaggcggctgggaggtggaggttgtagcgagccgagatcacgccactgcactccagcctgggcaccattgagcactgagtgaacgagactccgtctgcaatcccggcaccttgggaggccgaggctggcggatcactcccggttaggagctggagaccagcccggccaacacagcgaatccccgtctccaccaaaaaaatacgaaaaccagtcaggcgtggcggcgcgcgcctgcaatcacaggcactcagcaggctgaggcaggagaatcaggcagggaggttgcagtgagccaagatggcagcagtaccgtccagcttcggctcggcatcagagggagaccctggaaagagagggagagggagaccatggggagagggagagggagaggggactaattttgtatttttattagagatgggatatgaccatgttggccaggctggtcttgaactcctggtctcaagcaatccgcctgcctcagcctccatccaggtgttgggattataggcatgagccaccgcacctggccttttgttctgttttttttgttttttgttttttgttttgagacagagtttcactcttgttgcccaggctggagtgcaatggtgcgatctcggctcactgcaacccccacctcccaggttcaagcgattctcctgcttcaacctgcctagcagctgggattacaggcatgtgccaccaagcccggctatttctgtatttttaatagagacagggtttctccatgttggtcaggctggtctcgaactcccgacctcaggtgatctgcccaccttggcctcccaaagtgctgggattacaggcatgagccaccgcacctggcccgttctggtttttgaggagcatcacagaagcatctttcactggcactgtgacagtgttcatcacataaactaatgatcatcttctctaagcagcagtcactgctgtagaaattcctcctacggaggacatcattcaggctcactgcctcatatataggaggctcttgactgaactctttttttctggacatggaattttgctcttgttgcccaggctggagtgcaatggcatgatctccactcactgcaacctccgcctcctgggttcaagtgattctcctgccttggtttcccaagtagctggaattacagccgcccaccaccatgcctggcaaatttttgtatttttagtagagataaggtgttcttaaactttgaagatcacttttgggacgtttaaaataactgttgctttttgtgtaatatttacacatttcaatattaactattatttaccatctgtacttttttttttgagatggattattgctctgtcacccaggctggagtgcagtggcatgatctcgcctcactgcaagctctgcctccagggttcacgccattctcctgcctcagcctcccaagtagctaggactataggcacctatcactacacctggctaatttttttgtatttttagtacagatagggtttcaccatgttagcgaggatggtctcgagctcctgaccttgtgatccacctgcctcgtcctcccaaagtgctgggactacaggtgtgagccactgcacctggcctaccatctgtacttaattggaaacctattggtctttatattttttagatagctctttaaaatccatgatggagttctcatcaactgggcacggtaatacaggagaagtgattcacacagggacgttgcaaatacatgaaagtcatcacactggagatttttgcttcccagaaatcaagaaagatattcatcactttgagtttcagtggcaagaaatttaaagaaatggccatgaagcacccatgacagaaaccaaagagttgacaggtagtacagactgacgtgatcaaagacatgctggaaacaagcctattaaagatcagcttggatcaagctttcattcgcatctgcctgaactccacatgtttcagacccaagggaaaattggtaatcaagtggagaagtctatcaatgatgcttcctcagcttcaacatcccaaataatttgtaggctcaaaacccatatttctattaagtatgggaagaatttcctctattcttcattattcacacaaatacaagaagtacacatgagggaaaaacctttccaatgtaatgagtgtggcaaagcctttaatcatagctcatgtttaaggagacatcacgtaacccattcaggagagaaacagtataaatgtgatgtatgtggcaaagtctttcatcagaagcaataccttgcatggcaccatagtgttcatactggagaaaaaccttacaagtgtaatgagtgttccaagaccttcaatcagaagtcatcccttcagtgtcatcatagacttcatactgtacagaaacattacaaatgtgaagaatgcaacaaagtttagagttgaggatcacaacttgaaacacacaggagaattcatactggagaaaaaccatacaaacgtaaggtttgtgacaaggctttctgggataattcatgcctttcatgccgtaagagttcatactggagagaaatgttacacatgtaacgaatgtggcaaggcttttagtagaaaagcaaaccttgcacatcatggacttcatactggagggaaatcttacaaatgtaagggttgtgacaaggttttccaccatgatttatgccttgcacaacatcagagagttcatactggagagaaccttacacatttcacgagtatggaaagacctttgctcaaaattcagcccttgtaatgcataaggcaattcatactggaaagaaaccttacacatgtaatgaatgtggcaaggtttttagtagaaaagcacaccttgcatgtcatcatagacttcatactgtctaaggtttctaatcaacaatcaaaccttgcacaacatcagagagtttatactggagagaaaccttacaagtgtaatgagtggggcaaagccttaagtgggaagtcgtcacttttttatcatcaagcaatccatggtgtagggaaactttgcaaatgtaatgattgtcacaaagtcttcagtaatgctacaaccattgcaaatcactggagaatccataatgaagacagatcttacaagtgtaataaatgtggtaaaattttcagacatcgatcatatcttgcagtttatcagcgaactcatactggagagaaaccttacaaatatcatgactgtggcaaggtcttcagtcaagcttcatcctatgcaaaacataggagaattcatacaggagagaaacctcacaagtgtgatgattgtggcaaagtcttgacttcacgttcacacctcattagacatcagagaatccatactggacagaaatcttacaaatgtcttaagtgtggcaaggtcttcagtctgtgggcactccatgcagaacatcagaaaattcatttttgagataactgttccaaatacagtgactatagaagatcataaagctttaattgacattagagccaaataggcattgacttgagattgagttgacttaaccttgagtttaagaattaatttacattaaagtgtttatgttaagaagattgggccaggtggggtggctcatgcctgtaatcccagcactttgggagcccaaggctgatagatcacagccacacctggctatgagagtgtgtaggtggccgttggggtgggacctgattagaaggggcagggccttgaacagaatctgggcggggcaagaatgaggaggctgcctggaggccgggccagagggtgatcgtcatcttgagggcaaggtctggaagtggtgttttgaagggcagggtctcgagggggcgggtcctggctttctcctcagctggaccccaggtgtcgtctgctgtcatcctcttgccctgcaggactagattctccgggtactaattggtggatagtttctgatgtgccgtgatattacccctaatatcacagggatgcctcctgtccattttagagacttgctctgtcgcccaggctggagggcagtggcgcgatctcggctcattgcaagctccgcctcccgggttcatgccattctcctgcctcagcctcccgagtagctgggactacaggcgcccgccaccatgcctggctaattttttgtattttcagtagagacggggtttcactgtgttagccaggatggtctcgatctcctgacctcgtgatccgcccgcctcggcctcccaaagtgctgggattacaggcgcgagccaccgcgcccggcccctaagttaatatttcaaacaatcgaaggtaaaacaacatattgtgttgggccacctgtactgaacgctgaatcgtttttcctcttaagttgaaaatggttttaatgcaaagcgccttttttgagcaggtagagtcacgcatccggcaggcggggcgagctcccctctgtctggggcagggtgggggagaggggcagggacctcggtaaaggggtggagtggcgcgctggttgccgcgggcactggcaattagaagggattattaaactaagcaaggtcctgggttgtttgagtggataatggaaactgaaaggtgacgtgcaaaactgcctattactcccaggagtggaggataatttcatatttcatggaaataaactcagggcccggagcggtggctcacacctgtaatcccagcactttgagaggccaaggagggaggatcgcttaagcccaggaattcgaaatcagcctaggcaacatagtaagacctcatctctactaaaaataaaaaaaaacagccaggtgtgttagtccacacctgtggtcccagctgcttggggtgctgaggtgggaggatcacttgagccagaaagttggaggctgcagtgagctctgatcttgccaccacactccagcctgggtgaaaaagctagaccctgtctcaaacaagcaaataaatgagaggtataagtcctcctttaaaagtaaaggaagagatttttctttccttttgtctcttagaacattcaattagaaaatttgtaaattcattttctctgtcttctgaggtttttttttttagacagagtttttctcttgttacccaggcttgagtgcaagccacgatctcgcctcaccacaacctccgtctcccgagttcaagcgattctcctgcctcagcttcccgagtagctgggattacaggtatgaaccactatgcccggctaactttgttttttttttttagaaattaaaccttttttcagcttaatgacccaggggtgtatttttgaaggacttgggagctctctttgaaaggcaaacaacaagggaaacagtacctttatctcagtaggaaattaaataattcaaacatcaaataacttcaatttaaggctatggactttgagataattctgagccttgagaggaatgtggtcaggcaacctgagtccagtggaatgcaggtgcaacttctaagagttttcctgtaagtaattaagaagactaagtagccccagagataagacctcctcggatcattgtcccttcttatgtagtgataaagtaaccttccttgaagtgtatctatccgtaatcaatcaagttgctgcagcctatgcactggcccagaataaaaaacgtggtgattctgctaaagcttctctgtctttccctgtgtgtgaaatcttaacgtctctacttgggaacgctgatcccattcatttagagttgatgtttccacgtggctatttccaagctttgccttcaaataaattctgtacttaatcatatattctaaattttattatttactgctgacatcagtttctgtcggattgtaggagcctcaccagagagggcccctgtcgccatgttgtaaaactcacacttgccaaaagttgtgggttagggtttctccccctccctcaggatgacgctagttagctgacacagatggtcacctccattaccaagtagagtcaggatgaactatgtgtgactgttcaactatgtgtcctcttccctgaggactgattagtgtttatcttgaaaacatgtccttaatgggttgtatagaacactgaagcatctgatttcaaactcttagctcttttcctctatttcccatcacattctggtctaaggcttatttattaataaaatgatttttatttctttattatcgtggagatgatttttcatttgggggaagatcattttgttttcaaatatattgtctcaacatttaaatagtgaagtaaagagtatttcttgtgccaggcatggtggctcacgcctgtaatcacagcactctgggaggccaaggcaggcagatcacttcaagtcaggagtttgagaccagcctggccaacatggtgaaaccccatctctaccaattatacaaaaattagccggacatggtggcgcgcttgtaatgccagctattccggagggtgaggcaggagaatcacttcaacacagggtgtacaggctgcactgagccgagaccttgccactgcactccagcctggacgacagagaaatactctgtcttaaaaaaaaaaaaaggaaattaagaaagtaatagatctcctccacaaatgtgctgggacaactaacttgatattcacatggaaaagaataatgttggatccctacatcacacaatcaaaattttattttaaaaagttagagaacgaggaagggagccctgcgggagggggtgttactttgtcgcccaggctggtctggaaccccaggctcagcaaccctcccgctgctgcttcctgagtagctgggacctcaggctccctccccagtgcccgcatctctgctgtgtttaagcagcaggtggtgacttcgctcctccctggcctgagcactccgtcccgcatcccaggcggtggccctagggaagtctctgaagctgagcacagggtggactctgcccccaccgccgacccgccctccccgaccccgagtgaatggagaatagaaagggagaggatttctgttctgtcctgtgggccctcagtatgaaatcgtagttctgcccaggcaggactttgcatttcacattctagtttgcatccccgttccagacaattccagggcttttgactcatgcctcagccttcccggccagtctcccttccaaaacccgaaaaacggaggcgctgggctcaagactgactctgtcccgccccggccccgccctctgccggttctaaagggcaaagtctctccgcctcgcgccccgcttccgcctgcccaggccccgcccacctcctcctggaccccgcccaggcctggcttctgtcctgcgcgagcagatcagcgcgaacctggaagcggagagcgtggagtgaaggtcccacggcagcgcgtgagtttctctctgttttatattaagtctgtgcgtcccaggtccccggcgcgtctgtacctgggacgtggggtccccacagacctggaaattctcgcccgtcttcacccagagcaaattgagacttccctttgagagtccggggttcacttccttttgggtttaaaatcgccttgaagctggtgcggtctctggtcttgctgctatagggcaatgtatacactttgtattgggtagttttcctgctcaaaacctttttctaactcctcccgccccgcgctttttaaagtccttacaggtgaggtggattcccgccctgggcgcctcccaccctcgccttcgacggcccctcgagtgcagcgccgtgcccccagtcccgcggaggctgcgtcctctgcctggtcctgagatccttcagaccccaccattgtcttaaggcgccgtcgtcccccacctcccttctcgtgccgggccctgctgctccccaggtctcctctccgccgtcaccgcttcccctgagcccgcgttgggaaggtgtccggggcctgtcctgtgacacggggtgtccttgcctgcccagctccagcccctggaaaatgagctcccccgggatgcagacgtcttactccaaaccctcctgtaattgtatgggccaaaggaatcaggtgagagagagcagtagaaaacctgagataagaaaagagcaggaggagaaaagcaactggagaaatgtagagaaaagctagatgtacagagagatgaaggacagcaaggaagagagggggcagcaaagaggaaggctcatcagagtgagggagaggaggaggggtttggagccagggcagacagagcagagtggtgctggtggcaaggacagagggagaagcacagcagggaggactactgtgggtctagagtgccataaagtgtggacagggatgtataacagggaagagagaatgtaacagggagagcagaggaggcgcagagatgggagaagaggcggaatctatggaggttgaggacaatccaaagattgtgggagaaggagcaataagaggttaaataagtagcgaggatggagcagaaaaggtggaagagaagtaatagagggaagaaggggataaacagcagaagaggagaggggcaaaaatgaggcacggaagcccagggaaaaagacaagaaaacaagagctagagagagaaggggagaatgagagatatgtacagatttagcgagggaagcacagtaatgaagacagaggggctgggcgcagtagctcacgtctctaatcccagcactataggagactgagacaaggggattgcttgagtacaggagttcgagcaacataatgagacctccccatctctgaccaaaaaaaaaaaaaaaaaaaaaaattaaccgggcgtgatggtgcacagctgtaatcctagctactctggaggctgacgtaggaggataacttgagcccaggaggcccaggctgcagtgagccgagatcatgccactgcactccagcctggtcaacagagtgagacactgtctcaaaagaaaaaaaggagcgggggactttgggtaaagatgagtaggttagttcactggatatcattagtcgttgacttctttgtatataatctgataacttaaaacttgtttaaattatacagatgaggttgagaatttttaaactcctgtctatgagacatgtacctgtaaatcttagcatcagaggttagcttccacctgaaatccctattcagccaaacagcagtgacttattcagttgtgagtcactctcttgccttttcccagagttgggtaggaagtggagcagtgaagtgggaaaaaaaaaattggtgttattacataatacttttaatttaattaattaatatttgggatgggctctggctctgtagcccaggctcacgactgtaatcccagcactttgggtgaggctagtggatcacttcaggtcaggagtttgagaccagcctggccaacatgatgaaactccgtctctactaaaaatacaaaaattagccgagcatggtggtactcacctgaaatcccagatactagaaaggctgaggaaaaagaatcgcttgagcccaggagcagaaggttgcagtgagccaagagcctgccactgcactccagcccaggtgacagtgcgagactctgtttcaaaaagcaaaacaaaaccatctgggtgactttaaagataatccagttctggccaggcacgatggctcacgcctgtcatcccagcactttgggaggctgaggcaggcggatcaccagaggtcgggagttccagaacagccttaccaacatggagaaaccttgtttctactaaaaacacaaaattagccaggggtggtggggcatgactgtagtcccaactactcgagaggctgaggtgagagaagtcacttgaacccgggaggcggaggttgtggtgagttgagatcgcgccattgcactccaccttgggcaacaagagtgaaattccgtctaaaaaaaacaaaaagatatccatttccctgtttgctactcctgtgtttttgattcagtagttcttggacgagagctcgttgtccacatattacatatgactattctccctaagcattcagaaggaggcagtcagtggaggaaattgtgaaatattttgctagatccatctgtaatgttttctttcttactaaaacatagggctgcggctctagaaaagctccagcacgtcatcttcctttttttttttttttttttttttttttttttttaataagcaggagtctttctgacctgttatctccatgttggagtgagggaaggagccctggactgtggagaatgaagtgaaaataacaaaaaaaatacagatgggtaggaatgtattatgggtgtaaacacaaataggagctcagatgggcagagtggaagctccaccctcaaatctctctgcaagtgggagaattcggcgggaaaagaaaagtttaaatcctgagatctctgagtggacatctttctttgccccctcttatgtctctgttatttattttattttattttatttatttatttatttattttgagacagcgtctcactctgttgcatagactggagtgcagtggcacaatagctcactacgacctccaccacctgggttcaagtgattctcctgcctcagcctcccaagtagctggaactacaggcatgcatcaccaccatactaggctaatttctgcatttttggtagagacggggttgtgccatgttggccaggctggtctcgaactcctgacctcaggtgtttttcctgcctcggcctcccaaagtgctgaaattacaagtgtgagtcaccacgccaggcccctctgctctttagatgtgtagtagtttgatttttttgtcctctagtgatgctgcagctcagagacaaaggcagaatctttatcctgatgggcaacaccgtgtcatctggcttctgtgacctcattggtttcttgactctggaacagggagggctgtgtcaaaggggtctccttcccctgtggtctctcattctgtacttgactccttctgacgctccattctctgtccctatagataagatctgaggcctccatacacctaccccttgacctaccaggttccatcccatttcctgtacttggaacacctaatcaagagatcggaaaacctgggctgctcctcctttgcaaccggggcccgggatactgcacagagccctctctgcttgttcaaatagttggcttgcctatttgaagtaggaaaaaaaggccatgcgcggtggctcatgcctgtaatcccatcattttgagaggctgaggagggcggatcacttcaggtcgggagtttgagaccagcctggccaacatggtgaaactccgtctctactaaaaataccaaaagtagccgggtgtggtggtgggtgcctgtaatcccagctactcgggagactgaggcagaagaatctctcgaacccgggaggtggactctgcagtgagctgagattccgacactgcactttagcctgggcaacaaagaaagactccaccccccgccaaaaaaaagaaatacaaaaaaaaaaaaagtgtttttcctactctctcatgccactgagcacagaatgcctcagttctgatcaccaaaatttgtggatttctccccaaccacatcttggagtgcaatggtgtgatcttggctcaccacaaactctgtttcctgggttgagatgattctcctgcctcagcctcctgagtatctggcaaaagagcaagacctcatctcaaaataaaataaaatatgtgagaacaaaattactcaaagtacaaaaggctaatcagagactcaaagaaaacaaccatttgtctcttatttacctatgtcctggaatccaccccccaccccgctttgggttgttccacctttcccgacttaaccaacgtacatctgacacttactgatacgtcatgactccctaaaatgtaagctctacctagaccatattgggcacatgacattaggacctcttgagcctgtgtcgtgggcatgcagttaaccttggcaagataaactttctaaactgattgagatttgtctcagatacttcgttcacaaactatttttaaagtcccaggtaatttattttagcagctaaaagaaaaatcttggctggcacgttggctcatgcctgtaatcccagcaccttgggaggccaaggcggttggatcacaaggtcaggagttcaagatcatcctggccaacatggtgaaaccttgtctctactacaaatacaaaaattagtgggcatcttggcatgtgcctgtaatccccgctacctcagaggctgaggctggagaatcgcttgatccagggagtcatgggttgcagtgagccgagattgtgccacttcactctagcctggtgacagagaagactgtccaaaaaaaaaaaaaaaaaaaaaaaaaaaaaaaaaaaaagctggtttcaggggtttctggttacaacaggaagtttcagcagccatacttcagagaatcacgttcttgaagcaatgtttgtatcctgagttcatttttcatctgtcctcttgactttggtttagttgtgaggcagcctcattttctggggtaatacctgatgttcgttgtctcatggccacggaaatcgaggacacggacacccaagagtggcgttaagagtggaagttcaataggcgaaagaaagtcaatagctctctgctacagagagaggtcctggaaaaatggtttgcagattcgtggcaaaacgtaggggttttatagatgagctggtggggaggtagtgtcttatctacataggaccagatgtaacatttgcatacggcatgaatttctggcagccccctccccaatcttttattatgcaggttctttgcctgagctgtgccatgttacccatttctttcttactgtacacgtgctaacaaaaaaggaaagacggagcttccatggtggacatgcctagccccaaggtagccccttttctattggcacagctgctgacttcccccatgcaagcttccagcttgcttacgtatgtttgcagatcgatttttcgggctgctctttgttagaacaaaacgatattttgggcagctttttgttagaagggaagctctgcagaggagtttttgcccttactgtctgcctaaatagtttatttttacctcctgtataagttggatgtggcaagagtgacccaattgataagatgaacttttatcacggcagaattttaaattcactttacgtgcattctgcaagtaactagaaaagatactttttatttgcaaattataaggtgttttgtttgtttgtttgttgttatttgagacaatctcactgtgtcacccaggctggagtgcagtggtgcgatctcgactcactgcaactcccgcctcccaggttcaagcaattttcctgcttcaacctcctgagtagctgggattacaggtgtgggccaccatgcccggctaatttttgtatttttagtagaaacggcatttcgctatgttggccaggctggtcttgaactcctgtcctcaagtgatctgcctgcctcggcctcccaacgtgctgggattacaggcatgagccaccacacctggccaattataaggtattttattttttattatttttattattattttttgagacggagtctcagtctgtcacccaggctgcagtgcagtagcacgatcttgcctcactgcatcctccttctcctgggttccagcaattctcctgcctctgcctcccgagtagctgggattacagccataagccattactcccagctaagttttttttgtctttttagtagagatgggatttcaccatattggccagtctagtctttaactcctgacctggtgatctgcgtgccttggcctcccaaaatgctaggattataggcttgagccaccgcacccggccctgtaagttattttataccttttctttgtttttctttctgtcaggtgtggtaagaaaacctgtaacatagatagccttcagaatatatttggatttactgtggagtcctaattagggaaaaggagtctggctagtgggaacagggggaaagcaaagagataaggcaaataagctatttaaaaaactaaacattgagctaccatatcatccagcaagcccagtgctgggtatatatacccagcactaggctaaatacaagaaataaaagaaatcagtatattgtgtgtatacttatagacaatgaagtaatgttcagccgtcaaaaagtatggcatcctgtcatttccaacaacatggatgcaactggagagagatatatatatatataaatatatataatatataaaaaatatataatatatataaatatatattatatataaaaaatatatataatatatattatataaaatatatatgtaatatatattatatataaaatatataatacataaaatatatatgtaatatatattatatataaaatatataatacataaaatatatattatatatgtaatatatataatctatatataatatagattatatatatatattttttttttgctgagacagattctcgctgtgtcacccaggctagagtgcagcagtgcgatctctgctcactgcaacctccgcctcctgggttcaagcgattctcctgcctcagcctcccaagtagctgagactacaatggtgcacaaccacgcccagctaaattttgtgttatttttattcgtattccccatatttacttttatttcacagtactttttatatccttactctgtatgtatttttgctctatgtaaagtaaaatgcatgccatgtgttcatttggggcgtaagagaaaggcatttagaagaatacaagtcccacttatcaatagggatgcaggtttgtcagagtgtgaaactgcactgctatgggattttcatcatgttcatataagtatcctaaggccgactgcagagaggataactgaagtggaaggtgtgattgtatgttctcaaattgtatgatgtttaattccatcataaaaaaaattgtaggctgggcgtggtggctcatgcctgtaatcccagcactttgggaggctgaggcaggcggatcacgagctcaggagatcgagaccaacctggctaacacagtgaaaccccgtctctataaaaatacaaaaaaattagccgggcatggtgtggcgggcacctgtagtcccagctacttgggaggctgaggcaggagaatggtgtgaacccgggaggcggagcttgcagtgagccagagcttgcagtgagctgagatcctgccactgcactccagcctgggcaacaaagcgagactccttctaagaaaaaaaaaaattgtagctccttcagccttagcaacctgatggcacattgtttgtgtttagacatgaaggatcctatagaggtgagataaagctatgcaggtagatggaacataattaactcagttataaaaaaattaaatgttgttaacacatgacatctgtgatacattctaaataaaacaatagaaactgtagcctagccatcacagtaaaaccccatctctaccaaaaaatacaaaaattagctgggcatagtggtggtacacctgtagtcccatatactagggaggctgaagcaggagaactggttgaacccaggaagcggaggttgcagtgagccatgatcgctccattgcactccagcctgggtgacagagtgagacactgtctcaaaaaacaaacaatagagaatgtaatgctgacagtttaaaaggattcctaatcaaggacatgctattgtgggtttttttttttaaaataaactctcctttttggaccaggcacagtggctcacacctgtaatcccagcacttttgggaggccaagcagaaggatcacttgagctcaggagttcaaaaccagcctgggacacatagtgaaaccccgtctctacaaatagaaaaaaaaaagctaaaaatccctcttctctgtggtaactgctcttttcaagttcaagattaagagaaatttttcctcaatcttgctaaatgacagctactgccattcaatggagatgtggctaacatgtcccctgcattacctctactgtatatgtaatcacttcctattaacgtattaatctcctccaataaaaactgcagcctcttaaggtcttggactgctctatttcatgattggttagtagagcatttctttcctataatccacactggccctctctgtgaagaatgccctgtatgcaataatctgactgatatcacagctttacattattctcagccccctacaaatcttaattcagccattttttttcctttttttttttttttgagacagagtctcactcttgtccaggctggagtgaagtggcacaatctaggctcactgcaacctctgcctcacgggttcaagtgattctcctgcctcagcctctcttgtagctgggattacaagcatgcatcaccatgcccggcgcatttttgtattgttatagtagagatgcggtttcactttgttgcccaagctggtctcgaactcctgatctaaggtaatatacctgcctcagcctcccaaagtgttggaattacaggcgtgagccaccatgcctggcccattctggtttttgaggagcatcacagaagcacatacataggcaacaatctccgtctggttctgtttccttttctttgtgtttttctttctttttttttttttttttttgagatggagtctcgcctgtcacccaggctggagtgcagtggcatgatctcagctcactgcaagctctgcctcccagattcaagcaattctcctgcctcagtctcccgagtagctgggattacaggtgccagccacaatatctggccaatttttatatttttagtaaagatggggtttcaccatgctggccaggctggtctcgaactcctgacctcaagtgatccacccatctccgcctcccaaagtgctgggattagccaatattcagccagtaattaatttcaaaagatagtgtccctgtttcacaggaacatggagagaaatgatttcacctaatgaagtaggccattgtttcctattcctgcctatagatcatgaaatgactaagaaagacatcataaaaacatttcaaatgtcagcttgaaagtcaacattggtaaagaagtctttctccttcaataatataatacattatttcatgacctgaaagtaactggccatttccaaatgtccttgagtctttgatatatatgtcatgacttttaacatattttgaattgtaattattctgcagaatgtaatataaaagatttatggtagagaattagacttcctattggctgggcacggtggctcacgccagtaatcccagcactctgggaggctgaggcgggcggatcacgaggtcaggagatcaagaccatcctggctaacacggtgaaaccccgtctctactaaaaatacataaaattagccggacatggtggcgggcacctgtaatcgcagctactcgggaggctgaggcaggagaatggcatgaacccgggaggtagagcttgcagtgagccgagatctcgccactgcaccccagtctgggcaacagagtgagactccatctcaaaaacaataaccaaaaaaagagaattagacttcctgtgagctctcagatggattatagtttgtgaataatttaccatatcattacatttgtaatggattgttccactataatttttatttttattttttgagatggagtctcactctgttgcccaggctgaagtgcagtggcaggaccttggctcactgcaacctccgcctcccaggttcaagtgattctcctgcctcagcctcccaagtagctgggattacaggcacgcactaccacacctgggtaatttttgtatttttagtagagagggggtttcatcatgttggccaggccagtctcaaactcctgacctcatggtctgcctgcctcagcctcccaatgtgctgggattacaggcgtgagccaccatgcccgggctccactatgatttttttttttttttttgagacagaatctcgctctgtcgaccaggctggagtgcagtggtgtgatctcggctcactgcaacctctgcctgccgggttcaagtgactctcctgcctcggtctcccaagcagtgtggactacaggcgtgtgccaccacccccagctaatttttgaatttttagtagagacgggatttcaccatgttggttggctaggatggtctcaatctcttgacttcatgatccacctgcctcggtctcccaaagttctgggattacaggcatgagtcactgggtccggccctccactatgaatttttaatgaaccctgaggatgcatcttagattagtaacctttccagattcactacatttgcctggtttttattgagtggatctctcacgacaaaatcatgaatattacactgaaaggcttattacattatctttgtgtagttactctccagtataaaccctgtgatgttccggttttgatgcctgggtaaaagcttaagcatgcacgttacatttgtatggtttcatcaaaaaagtttttgatgcctagtgagactttggcctgcggaaaatctctatcacatataattattataaatgctctttagtatggattctctgatgttgatgaatgtttgaagtcataatggtttcccactctcagtgtttttgtttctctcaagcatgaatttttgcaatattgtacaatgtgagaattgtgccagaagaccttgccacattcattacatttgttaggtttctcaccagcaagaattctttgaagaatcctggtctcagattttaccttaagaccttgccacattcagtacattagtaaagtttctgtcctctatggtctagctaacggttattaagccttgaacaaaaactaaaggctctgctacattcattatacttgcaaagtttttctccagtataaattattgtatgtcttacaaggctttaatgctaactgaacactctgccacattaattacatgtgttagatttctttccggcatgaaatctctgatgacgtacaagatatgaattgtcgcggaagagtttgccacattcattacatttgaaatgtttctctccagtgtggatcgcatgatgattagtgaggcttgaacgcatactaaaagctttgccacattcattacatttgaaaggtttctctccagtgtgaattttccgatgatgtgctagggatgagtttagaccgaagaccttcccacattcattacatttataagctttttctccagtatgaattctccaatgatatgcaaggtatgaattttgactgaagactttgccacattcatcacatttgtaaggtttctctccagtatggattctgtgatgttgtacaagatgtgaattttgactgaatgctttgtcacattcatcacacttataaggtttctcaccggcatgaattatcagatgttgggcaaggtatgaattgcgactgaagaccttgccacattcattacatttgtaaggtttctctccagtgtggattctccagtgatttactagggatgacttgtgactgaagaccttgccacactcattacatttgtaaggtttctctccagtatgaattctccagtgatttactagggatgacttgtgactgaagaccttgccacactcattacatttgtaaggtttctctccagtgtggattctctgatgttgtgcaaggtgtgaaatatgatggaagacctttccacatacattacatctgtaaggtttctctccagtatgaatgatcagatgttgtacaaggtaggaattgcgactgaacaccttgccacatttgttacattcgtaaggtttttctccagtatgaattgtccgatgttgtgcaaggtgtgaaatttgatggaagacctttccacattcattacatttataaggtttctctccggtatgaattctttgatgttgtgcaaggtgtgaaatttgattaaagaccttgccacattcattacatttatatggtttctctccagtatgaatcctgcgatgctgtgcaaggtgtgacatattatggaagaccttgccacattcattacatttatatggcttctctccagtatgaattctttgatgacttgcaaggtttgattttttattgaagatcttgccacatatatcacatttaaattgcgtctctttagtatggattatttgatgtatagtaaaatgtaagccttgatgaaaggccttgccacgctcactacatttgtagtgttctgtcccaatatttgctttctctttttgtgtgaataatgaatccacaaaattacattcatatgtatgagaaatgtgggttttgacagtagaagaaatacgttggggtggggaaactaaggaactactgttgacagatttttccatgtgatcatatttatatattttcccttcagcttgaaatagctgcagttctggtagatgtgactgcgggtttaatccaagctgatttttaacaggctgcttttgtgcatcatcctttctcccatgcatgtctcttctaccaatgagactttccttataggtcacacgcactcgcttataatgtcttcaatcatgtttccacagacactgagagtcatgtacatttttctgggtttctctgaagcaaaaatcttgtatgtcgtggctttcatgtctttccaacattactgtctggaatatttctcctgtattactctccttttttggtggtaattccttgatctcacatttagaaaaaatacctacaagatataaggatcccacagtttccaattaattacagatagtcaataaatatctcctattgaaatgtgtaatagtacactaagagtaatacttatgttaaagaaagttataaaactcccattcatgatttttaactttttggaaaacaaaaggaacagatattttctaatagagaaagggtgactgcacataattcaaactaattgcagaaaagcctagtataaagaaacctatggccaaaccacttacattgcaaaaatttaggttagctccccaaaattgagattttttccaacatgaagcctgagcatactgcaatagaaggaaaacatatggctgtctaatagttgaaagaattttgtacttaagaaatttattgactaaggtcagagaaaacattctttggagcaaactgaaaaataaaaaggtatacaacacaacgaaggcacccatggcctaaatgtttgcactgaccaaaagatcctattccccaatattatgttattgcaagtggggacattgggcaacaattaggccatgaggaggaagggaggaagctctcatgaacaggattagtgcctgtataagaaaaaccactagagtacttgcttcctctcactctgacatatgatagacacagcaagaagcaggttggggccaggtgcggtggctcatgcctttaatctcagcaactggggaggccacggtgagtgaatcatctgaggtcaggagttccagaccagcctgaccaacatgattaaaccctgtctctactaaaaatacaaaaattagcaaaactccatctcaaaaaaaaagcagactggggtaaaatagaaagaaggcaccacccaggaagtgtttttatgcattttgatcttggacttcactgcttacaggtttatgagaaattatttcctgaagtttaggatgtaagcatctcagtctacagtatttcttatggcaggctgatgtggttaagacatgaaaagttagatggatgaaaaggtccatctaatgaacatgacagagactgataaatcttttttttctttttgagacgaagtctcactcttgtgccccaggctggagtgcaatggcacgacctcggctcgctgcaacctccgccacacgagttcaagcgattctcctgcctcagcctcctgagtagctgggattacaggcgactgccaccatgcccagctaacttttgtattttaatagagacggggcttcaccaagttggccaggctggtctcgaactcctgaccttaggtgatccacccaccttgggctcccaaagtgctgggatttcaggtgtgagccactgcgcccagccaaatcttttcttaaataaagtaacttttccatctttacaaaaacttcaatattcctagccgtctaccaacaccaacttgccaaaagaaacttggagtaaattattgcttttcaaatagagtaggtccaccaatttacactgcaagtaagtgaggtcaatgggatttgatcttgggctgcagatccagacatttcttaaaagtggatgcagtattgacccagcaatcccattactgggtatatacccaaaggattataaatcattttactataaaggcacatgcacatgtatgtttcttgcagcaatatttacaatagcaaagacttagaaccaacccaaatgcccatcaaggatatactggataaagaaaatgtggcacatatactgcatggaatactatgcagccataaaaaagaacgaggttggcaggacacagtggctcacacctgtaatcccagcactttgggaggctgaggtgggcggatcacctgaggtcgggagttggagaccagcctgatcaacatggtgaaaccccgtctctactaaaaatacaaaattagccgggcatggtggcgcatacctgtaattccagcaacttctgaggctgaggcgggagaatcgcttgaacccgggaggcggaggtggtggtgagccgagattgtgccactgcactccagcctgggcaacaagagcaaaaactccatctcggaaaaagaaaaaaaagaatgagatcatgtcctttgtagggacatggatggagctggaagccatcgttctcagcaaactaacacaggaacagaaaaccaaacaccgcatgttctcactcataagtgggagttgaacgattagaacacatggtcacagggagggaagcaacatagagcagggcctatcagggggtagggggcaaggggagggagaacattgggaaagatacctaatgcatgcagggcttaaaacctagatgatgggttgatgggtgcagcaaaccaccacggcacacatatacccacacgacaaacctgcacaacacgacacgacatggcaaatagatgcatagaaaggaatcatttcaagggagctacaagaacggggttgtgttgctgaccatgtcacttggtaatccttcctagacagcggtatgtccaccatcgtacagagcagacatcggtttaggctgtgttctgagaaagccgtcctacagataagcaagtgtctttccttacatggtgagagtagcatggggactgagtactgtggatattgaggtggtcagaaatacaaagattaatatgttaagaagtgacagtaggccgggagcagtggctcatgcctgtaatcccaacactttgggaggcccaggcaggtggatcacctgaagtcaggagttcaaacacagcctggccaacatggtgaaaccctgtctctactaaaaatacaaaaattagctgggcatggtggcatgtgactgcagtcccagctacttgggaggctgaggcaggagaattgcttgaaccccagaggtggaggttacagtgaaccgagatcgtgtcactgcactccagcctgggcaacagagtgagattgtctcaaaaaaaaaaaaaaaaaaaaaaaaaaaattcccacccatcttattttcacttcatgctacacagtccagggctctttgccttgctccaacaggttagaaagagactcctgcttataaaaagtaggaaacatgacatgttggaagttttctagatccccagccctatgtttctgtaggaaagaagacattacagatggacttaggaaaatatctcacaaattcctccactgactgcctccttctgaatctttaaagagcactgtaatatgtggacactgagctctcttcccagaactactgaatcaaaagcacaggagtagcaaatagggaactggatatctttaaagtctgccatgaggttttgttttgtttttgttttttgagacagaatcttgctctgttacccgggctggagtgcagtcatgcattctcggctcactgcaaccattgcctcccaggttcaggtgataatcttaccttagcctttctagtacctgggattacagacatgtgccatcacgcctggataatttttgtgtttttttttttttgagatggagcctggctgtctcccaggctagagtgcagtggcacgatctcagctcactgcaagctccgtcccctgggttcatgccattctcctgcctcagcctcccaagtagctgggactacaggtgcccaccaccacacccggctaatttttttttgtatttttagtagagacagggtttcactgtgttcaccaggatggtctcgatctcctgaccttgtgatccgccctcatcagcctcccagagtgctgggattacaggcgtgagccaccgcgcctggccaatttttgtatttttagtagagatgacgtttcgccatgttggtgaggctagtatcgaactcctgacctgaagtgatccacaagctttggcctcccaaagtgctgggattacaggcatgagtcaccacgccttgccagccataaggttttaagccttctttacttctggaacccccactgagctatcatgaagaacgcagaacatctaaaaaaggggacagtgaaagtccagatgctacatcatgaagcttttcatttcaaaatcaatacggcttccattttagtcaagcaaggatgcaactcccaagagaaacaagagaaaatgcaaagatacacaagggaacatccccacttctggagggaagttatcctcacccagggagaccaggttcctataattctccaacatcacatctctgtatagagtcctctgagcagggtccaggcatttccactcctcctgagagaattctatggccacatccctgaatgtcaatagaccctgaaatgaaaacacattttaaccaaatggttatgggaggagttcttatctttacagaaaatgaggagagcggtgacaacaaggatttaattgtagtgaatgttctgacaaatctgagtaagggatttttcaccacatgatgtcttcccagtggtgtttgattatactttttgaagaggtcataataccctcttgttataaatttattatgtttgtgaagaatacaagaaacactcaaataaatagatgcctggttcccattatagaaatgttagaaacttttggccaggtgctgtggctcacgcctgtaatcccaacactttgggaggctgaggcaggtggatcacaaggtcaggaattcgagactagcctggacaatatggtgaaactctgtctgtactaaaaatacaaaaattagctggatgtggtggtagatgcctgtagtctcagctactcaggaggctgaggcaggagaattgcttgaagccgggaggtagaggttgcagtgagccaagatcatgccactgcactccaacctgggcaacagagtgagactccatctccaaaaaaaaaaaaaaatgttagaaacttttattgacacaccaagtgacactcagtatctagatgagatagagcatgagtgatgccttcaaagatgacaacgtccacagtgaaatagccgggctcaatggcacatgcctgtaatcccagctacatgggaggctgaggccggagacttgcttgatcctgggaggcagaggttgcagtaatccaagatcacaccactgcactccagcctgttcaacagaaactccatctcaaagaaagaaaaaaaaatttagctgggcatggtggcaggcatctgtggttccaactacttgggaggccgaggtgggaggatgtctttaccatgagggtacaggttgcagtgagctatgattgcaccactgagcttcagcctgggcaacaaagcgaggccccatctcaaaatacaagaaaacaaaattactcaaagtacaaaaatacattttttatatatatgtccacaaaataataaaatttacgcagactcacaaaaaactagagttgaatgcaaagggttgtcattttccccagattttcaaaatacaaaagattttcaaaatatatacgtatgtgtgtatgtgtatatgtatatatgtgtgtgtatatctgtgtgtgtatatctctgtgtgtgtgtgtgtgtgtgtgtatatatagtttcctttaactgaagaggaatctcatcttggtggaaaaggaactttggcagttgagggcaggggagaatctgttcagttctaagaaaacaggagattacccatcctagaagcaatcactccttcaacagccttccctggaggaatcctcagatatctgtagtaatgcaggtgagcacagaggcagtgactatggcactccttatacagagaaaagtcacaaaggacccatatgttattcagccaatttccaatgcaggcatcaaagaggaaggtagccatatttactaatatgagaacatgttaattttcacaaccagcaggatgaaatatcagagtaaaatatttactaaacacaaagaagaaaacaacagacactaggcgtcaggcctctgagcccaagtctgcacgtatacatccagatggtctgaggcaagcgaaaagcacaaaagaagtgaaacagccagcttctgtcttaactgattgaccaaccttatgactttccattatgacttgtttctgccctgccccaactgaccaatggatcaacctcatgacattcttcttctggacaatgagtcctatgacctccccaccatgcactttgtgaccccctcctctgctgacaatagataaccacctttaattgtaactttccactgcttatcccagtcctataaaactgccactcccctatctccctttgctgactccttttttggactcagcctgcctgcacccaggtaaaataaacagccttgttgctcacacaaaacctgtttggtggtctcttcacagggacatacgtgacatttggtgagatgtgggacaggaggactccttcaggagactgatcccctgtcctgatctccatgaggagctccagctacgacctcaggtcctcagaccaaccagcccaaggaacgtctcaccaatttcaaattgggtaagtggtctttttactgtcttctccaactttgtcactatccctcatcatctttctcctttcaatttcagcaccacctttcaatctctcccttcccttaatttcagttcctttccttttctggtagagacagaggagacatgttttatccatgaacccaaaactccagcgctggtcacggacttgggaagacagtcttcccttggtgtttaatcactgcagggatgcctgtctgattattcacccacatttcagacttgttcaatcaccacagggacacctgccttgatcctccaccttggtggcaagtaccatttcctctttgtggcaagtaccaccccactctctctgtgtctctacccctcttttctctaaacttacgtttttactatgggcaaccatccaccctccattcctcctacttcccccttagcctgtgttcttaaaaacttgaaacctcttcaactctcacctgatctaaaacctaagcatcttattttctcctgcaacactgtttggccccaatacaaacttgataatggctctaaatggccagataatggcacttttgatttctccatcctacaagacctaaataatttttgtcataagatgggtaaatggtctgaggtgccttatgtccaggcattttttcacttcacttcctccctagcttctggtcccaatgtgactagtcccaaatgcttctttccctcctgcctgtcccttcagtcccaacaccaactgctgctgagtcttctgaatcctccttttctgaagacccctcttacctctctccccctccccaggccactcctcagaaggctgaatcaagtcccaattcttcctcagcctccactcccccaccctgtaaccctgctgtcacctcccctccccacacccagttcggcttacaatttcgttctgcagcaaatactccccaacctgcccaacaatttcctctttgagaagtgcctggagctgagggcatcggcagagtgcatgtaccattttctctatcagacctttcccaaattaatcaacacttaggccccttctcgtgagacaccactaaatatatacaggaattccagtatttaatccaatactacaacttaacctggagtgacttaaatgtcatcctaccttctaccctttccccagatgagtgggatagagtttataccctagcccagtcccacactgacacctgcaggcctcatgagccaaaccttcaacaaggcatctgggtagttccccaagaagatccctaatgggaataccagacaggctccccaggtatagctaggcaagattatgatttcctgcctagttgaagtgcttaaaaaggcagcttacaaagctgttaattatgacaaacttaaacgacccaaggtaaagatgaaaacccagcccagttcatggttcatctggcagcaattctgagacactttacagccctagaccctgaagggtcagaaggctgtctcattctcaatatgcattttatcaaccagtcagctcctgacattagaaaaaagcttcaaaaattggaatccagtcctcaaaccccacaacaggaattaatcaacctcaccttcaaagtgtgcaataatagagaggaggcagccaaatggcaatgcatttctgagttacaattacttgcctctgctgtgagacaaaactcagctgcagctccagcacacaagaacttcaaaacgcctaagctgcagtggtcaggcattcctacaggacctcctctctcaggatcttgcttcaagtgccagaaatctggccactgggccaaggaatgcctgcagccagggattcctcccaagccacgtcccatctgtgcagggacccatggaaatcagactgtccagctcacccagaagccactcctagagcccctaaagctctggcccatggctctttgactccttcccagatctgctcggcttagcagctgaagactgtcactgcccaattgcctcggaagccctctggaccatcagggatgctgagctttgggtaactcttacagtggggcgtaagtccatcccctgtttaattgatacaggggctaaccactccacattaccttcttttcaagggcctgtttcccttgcctccataactgttgtgggtattgatggccaggctcctggaccccttaaaacttcccaatttggtgccaacttgaacaatattcttttatgcactcctttttagttatccccacctgcccagttcccttattaggctgagacattttaaccaaattacctgcttccctgactattcctggactacagccacatctcattgccgcccttcttcccaacccaaagcctccttcacgtcttcctcttgtatccccccaccttaacccacaggtatgggacacctctgctccctccctggcaactgatcacacacccatacctaatcacccttaccctgctcaacaccagtatcccatcccacaacaggctttaaggggattaaagcctgttatcactcgcctgctacagcatgagcttctaaagtctaaaaactccttatgattcccccattttaagtgtccaaaagctggacgagtcttacaggttggttcaggatctgtgccttttaaaccaaattgttttgcctatccaccctgtggtgcccaacctgtacactcttttgttctcaatactgccctccacaactcactattccattcttgatcttaaacatgcttttttcactattcccctgcacccctcatcccagcccctctttgcttttacctggactgacactgacactcatcagtcccagcagcttacctgggctgtactgccgcaaggcttccgggatagccctcattacttcagccaagctctttctcatgatttactttcttttcactcctctgcttcctaccttattcaatacattgatgaccttctactctgtagtccctactttgagtctttgcaaaaggatatcctcctactccttcaacatttattctccaaaggatatcaggtatcccccaccaaagctcaaatttcttccccatccattacctaccttggcataattcttcatgaaaacatgcatgctatccctgccaactgtgtccagctgatctctcaaaccccaaccccttctataaaacaacaactcctttccttcctgggcatggttggatactttcacctttggacacctggctttgctgtcctaacaaaaccattgtatcaactcacaaagggaaacctagctgaccgcacagatcctaaatcctttccccactcgtctttccgttccttgaagacagctctggagactgctcccacactagctctccctgactcatcccaacccttttcactacacacagccgaagtgcagggttgtgcagtcggaattcttacacaaggaccaggactgcaccctgtagcctttttgtccaaacaacttgaccttcctattatacgctggccatgatgtctccgtgcagctaccaccaccctaatacttttagaggccctcaaagtcacaaactatgctcaactcactctccacatttctcataacttcccaaatctattttcttcctcacacctgatgcatatactttttgctccctggctccttcagctatactcactctttgttgagtctcccacaattaccattgttcctggcccagacatcaatccagcctgccacattattccagataccacacctgacccccatgactgtatctctctgatccccctgacattcactccatttccccctcctttcgtgttcctcatcctgatcacatttggtttattgatggcagttccaccaggcctaatcgccactcaccagcaaaggcaggctatgctatagtatcttccacatctatcattgaggctaccactctgccccactcccacagcctctcagcaagcagaactcattgcctaaactcaggccctcactcttgcaaagggactacacatcaatatttatactgactcaaaatataccttccatatcttgcaccaccatgctgttatatgggctgaaagaggtttcccccctatgcaagtgtcctccatcattaatgcctccttaataaaaactcttctcaaggccgcattctccttatgtcaagtctactccccccatatttggactccccacaacacaagctactatttctgtggtcactccattatgtatctctcagcaaagacccactggaattcccctggggaacttttcaccttctcaatgctccttcactcttcatctccaaagcccaactacatatatcacagaaacaattggggccttccagctccgtattacagacaagacatctatcaatactggcaaacttaaaaacattattgcttaggaaaacatttaccctgtatttcactccatccttggctaccttccccttgctcttcagactctcctcccaggccctcttcttatttacttatatccagccccataaataacagtgaaagtttgcttgtagacactcaatgctttctcatacaccatgaatattgaacctccccctctacacagttaccccatcagtccccattacaacctctgatggctgccgccctagctggatccctgagtctgggtaaaagacacctcttttagcacttcttctcatcttttcactttgcatttccaattttgccttgcaaaaggcctcttcttctgtggctcctccgcttacatgtgtctgcctgctaatcggacagggacatgtacactcatttttctcattcccaaaattcaatttgcaaatgggactgaacaacttcctatcccactcatgataccaaacagacaaaaaagagttattcctctaatccctctacttatagggttaggactttctgcttccactattgcccttggagctggaatagcaggcatttcaacttctgtcacgaccttccatagcctttcaaatgacatttctactagcattacagatatatcacaaactttatcagtccttcaggccaagtcaactcttagccccagttgtcctccaaaattgctgaggcctggacttactcactgctgaaaaaggaggactctgtatatttttaaatgaagagtattgtttttacgtaaatcagtctggcctggtatatgacaacataaactcaaggatagagcccagaaatttgccaaccaggcaaatcattacacaggacccatctggacactttctaactgagtgtcttggctactccctattcttagtcccctggtacctgtttttctccttctcttattcaggccctgtgtcttccatttagtttctcaattcatacaaaaccacattcagaccatcaccaatcattctatatgacaaatgctacttttaacaaccccacagtaccatcccccgcaccaagatctccccacagcctaaatccctattccttgtaactcattataaaattttccttaaggtgtccacgcagctcctaatctcactcgaagcaaccctgagaaacatcatccattatctctccataccacccccaaaaatttttgccaccccaacacttcactattttgttttatttttcttattaatataagaagacaggaatgtcaggcctctgagcccaagactgcaggtatacatccagatggcctgaggcaaccgaaaagtacaaaagaagtgaaacagccagcccctgtcttaactgattgaccaaccttatgactttccattatgacttgttcctgccctgccccaactgatcgatcgaccttgagaaattcttctggacaatgagtcttatgatctccccacaatgcaccttgtgacgctctcctctgctgacaatagataaccacctttaactgtaactatccactgcttaccccaggcctataaaactgccccaccccatctccttttgctgacttctttttcagacccagtctgcctgcacccaggtgaaataaacagccttgttgctcacacaaagcctatttggtggtctcttcacacagacgagcatgacactgcagtctagttgagggtggagggtgggaggaaggagaggcataaaaaagaaaaactattgggggccaggtgttgtggttcatgcctgtaattccagcactttgggaggccgaggtgggtggatcacctgaggtcaggaattcaagaccagcctggccaatgtggtgaaaccctctctctactaaaaatacaaaaattagccaggcatgatggcaggcacctgtaatcccagctactgaggcaggagaatcccttgaacctgggaggcagaaattgcaatgagctgagatcataccagtactctggcctgagcaaaagagcaaaactcagtctcaactaaataaataaataaatattgggtactgggcttaatgtcaaggtgatgaactactctgtacaacaaaccccgatgacacgagtttacctgtgtaacaaaccttcacatgtagccccaaacctaaagtaaaaaaatgaatattgtcaggcctctgagcccaagctaagccatcatatcccgtgacctgcacgtacacatccagatggccagttccttccttaactgatgacattccaccacaaaagaagtgaaaatggcctgttcctgccttaactgatgacactgtcttttgaaattccttctcctggctcatcctggctcaaaagctcccccactgagtacgttgtgacacccactcctgcccaccagagaacaacccccctttttcctttacctacccaaatcctataaaatggcccaacccctatctatctccctttactctctttttggactcagcccacctgcacccaggtgaaataaagttttattgctcacacaaagcctgtttggtggtctcttcacacggacacgcatgaaatttggtgccatgactcagattgggggacctcccttgggagatcaatcgctgtcctcctgctctttgctccatgaggaagatccacctacgacctcaggtcctcagactgaccagcccaagaaacatctcaccaatttcaaatccggtaagtggcctctttttactctcttctccaacctccctcactatccctcaacctctgtctcctttcaatcttggcaccacacttcaatctctcctttctcttaatttcaattcctttcattttctggtagagacaaaggagacacgttttatccgtggacccaaaactcgggcgccggtcacggagtagggaaggcagccttcccttggtgtttaatcattgcagggacgcctctctgattattcacccaggtttcagaggtgtcagaccacacagggacgcctgccttggtccttcacccttagcagcaagttccgcttttctagggaaggtgtaagtaccccaacaccttctctctgtgtctctaccccttcttcgcctttctggggggcaagaaaccccaaccccttctccttcacccttagcagcaagtcccacttttctaggggaggagcaagtaccccaaccccttatatctctgcaccccaatcccttatttccatgccccaacctcatatatctctgtgccccaacctcttatatctctgtgccccaatcccttatttccatgccctgacctcatatctctgtgccccaaccgctttcccacttttctggaggtaagaacccccaaaccccttccctccgtgtctctactctcttttctctgggcttgcctccttcactataggcaatattccaccctccattcctccttctccctttcctgtgttcttaagaacttaaaacctcttcaactctcacctgacctaaaatctaagcatcttattttcttctgcaatgccgctggaccccaatacaaactcgacagtagttccaaatagccagaaaacagcactttcaatttttccaccctgcaagatctaaataattcttgtcataaaataagcaaacggtctgaggtgcctgacatccaggcattcttttacacatcggtccctgtgcccagtctctgtgcccagtgcaactcatcccaaatcttccttctttccctcctgcctgttccctcagtcccaaccccaagcatcgctgagtctttctaatcttccttttctacaggcccatctgaactcttcccctcctccccaggctgctccttgccaggccgagctaggtcccaattcttcctcagcctccgctcctccaccctgtaatctttttatcacctcacctgctcacacccggtccggcttacagttttgttccgtgactagccctcccccacctgcccagcaatttactcttaaaaaggtggctggagctaaaggcatagtcaaggttaatgctcctttttctttattccaaatcagataacgtttaggctctttttcatcaaatataaaaatccagcccagttcatgactcgtttggcagcaaccctgagacactttacagccctagaccctaaaaggtcaaaaggccgtcttattctcaaaatacattttattacccaatctgctcccgacattaaataaaactccaaaaattaaattccggccctcaaaccccacaacaggatttaattaacctcaccttcaaggtgtacaataatagaaaaaagttgcaattccttgcctccactgtgagacaaaccccagccacatctccagcacacaagaacttccaaacgcctgaaccacagtggccaggcattcctccagaacctcctcccccaggagcttgctacaagtgccagaaatctggccactgggccaaggaatgcccgcagcccaggattcctcctaagccgtgtcccatctgtgtgggaccccactgaaaatcggaccgttcaactcacttggcaaccactcccagagcccctggaacgctggcccatggctctctgactgactccttcccagatcttcttggcttagtggctgaagactgacactgcccgatcgcctcggaagcctacaggaccatcacagatgctctaagtaactctcacagtggaaagtcagtctgtccccttcttaatcaatacggaggctacccactccacattaccttcttttcaagggcctgtttctcttgcctccataactgttgtgggtattgacagccaggcttctaagcctcttaaaactcccccactctggtgccaacttggacaacactcttttatgcactcttttttagttatccccacctgcccagttcccttgttaggctgagatattttaaccaaattatctgcttccctgactattcctggactacagccgcatctcactgctgcccttctccccaacccaaagcttccttcgcatcctcctctcgtatccccccaccttaacccacaagtatgggacatctccactccttccctggcaactgctcacatgcccgttaccatcccattaaaacctaatcacccttaccccactcaacgccagtatcccatcccacagcacgctttaaaaatattaaagcctgttatcactcgcctgttacagcatggccttttaaagcctataaactctccttacaactcccccattttacctgtcctaaaaccagataagacttaataggttagttcaggatctgcaccttatcaaccaaattgttttgcctatccaccccatggtgccaaacccatatactctcctatcctcagtacctgcctctactacccattattctgttctggatctcacacatgctttctttactattcctttgcacccttcatcccagcctctcttcgctttcacttggactgaccctgacacccattaggctcagcaaattacctggggctgtactgccgcaaggcttcacagacagcccccattacttcagtcaagcccaaatttcttcctcatctgttacctatctcagcataattctcataaaaacacatgtgctctccctgctgatcgtgtccaattaatctcccaaacctcaatcccttacaaaacaacaactcctttccttcctaggcatagttagtgtggtcagaattcttacacaagagccagaacggcaccctgtagcctttctgtccaaacaacttgaccttactgttttaggctggccatgatgtctgcgtgcagcagctgctgccgccctaatacttttagaggccctcaaaatcacaaactatgctcaacttactctctacatttctcataacttccaaaatctattttcttcctcatacctgatgcatatactttctgctccctggctccttcagctgcactcactctttgttaagtcccacaattaccattgttcctggcccggacttcaatccggcctcccacattattctggataccacacctgaccctcatgactgtatctctctgatccatctgacattcacaccatttccccatatttccttctttcctgttcttcacctgatcacgcttgatttattgatggcggttccaccaggcctaatcgccacacaccagcaaaggcaggctatgctatagtacaagccactagcccgcctcttagaacctctcatttcctttccatcgtggaaatctatcctcaaggaaataacttctcagtgttccatctgctattctactactcctcagggattattcaggcccccctcccttccctacacatcaagctcgaggatttgcccccacccaggactggcaaattagctttactcaacgtgccctgagtcaggaactaaaatatctcttagtctaggtagatactttcactggataggtagaggcctttcctacagggtctgagaaggccactgcagtcatttcttcccttctgtcagacataattcctcagtttggccttcccacctctatacagtctgacagcagaccagactttattagtcaaatcagccaagcagtttttcaggcttagtattcagtgaacccttatggtcctccatcttcaagaaaagtagaacggactaaaagtcttttaaaaacacacctcaccaagctcagccaccaacttaaaaaggactggacaatacttttaccactttcgcttctcagaattcaggcctgtcctcagaatgctacaaggtacagcccatttgagctcctttttattaggccccagtctcattccagacaccagaccaacttggactgtgccccaaaaaacttgtcatccctactatcttctgtctagtcatgctcctattcacccttgtcaactactcataaatgccctgctcttctttacactgccagtttacactgtttctccaagccagcacagctgatatctcctagtgctgtccacaaaccgccactcttaactcttaaagtaaataaataatctttactggcaaggctatgctgaacctccttaggcactctctagtattagatgtcgtagttcctcccaattcttagtcctttaatacctgtttttctccttctcttattccgtttagtttttctattcatacaaaactgtatccaggccatcaccaataattctaaatgataaatgtttcttccaacagccccacaatatcaccccttaccacaaaatcttccttcagcttagtctctcccactctaggttcccacgccacccctaatcccgctcgaagcagcccagagaaacatcgtccattctctctccataccacccccaaaaattttcaccgtcccaacactttaccactatttcgttttatttttcttattaatataagaagacaggaatatcaggcctctgagcccaagctaagccatcatatcccctgtgacctgcacatacacatccagatggcctgttcctgccttaactgatgacatcgtcttgtgaaattccttctcctggctcatcctggctcaaaagctcccctactgggcaccttgtggcccccacccctgcccaccagagaacaacccccctttttcctttacctacccaaatcctataaaacggccccaccccatctcccttcgctgactctcttttcagactcagcccacctgcacccaggtgaaataaacagctttattgctcacacaaagcctgtttggtagtctcttcacacggacgtgcatgaaaaatataatttcttttaatttactgccgttttttcctaaagtctcataatgatgcaaaaatacacgtgtacgagacttgctctgataacctggcacagaactgacagtagcggctccccagtgaggctggaaggagggtggaggatgtgacagggaaaggagacgctttatggccaagggcctaagatgcagctttgcttagagttttaccacaaaacaaatatattcattggtcaggtgtggtggctcatgcctgtaattccagcacttcgggaggcccaaggcaggcggatcacctgaggtcgggagtttgagaccagcctggccaacatggagaaacctcatttcttctaaaaatacaaaattagccgggcatggtgacgcatgcctggagtaccagctactcaggaggctgaggaaggcgaatcacttgaacccaaaaggtggaggttgcggtgagcaaagatcacgccattgcactccagactgggcaacaagagtgaaactctctcaaaataaataaataaataacaaatatatacatcatgtgatgttcaaatataaaaatatatattcattattaattggtggggctgggcaccgtggctcgcgcctgtaatcacagcactataggaggctgaggcagaaggatcacctgaggtcaggacttcgagaccagcctggccaacgtgatgaaaccctgtgtctactaaaaatacaaaaagattagccgggtgtggtggcatgtacctgtaatctcagctactcaggaggctgaggtaggagaatcacttgaactcagaaggcagaggttgcagtaagccaagatcaggccgttgcactccagcctgggtgacagagcaagactccatctcaaagcaacaacaataataataataataataataggtggaatgagaatatggctccatcctctaggatacaaaagtgcttctcccatagttgagaaaaatagtaactatttttaccaaaaacacctgtttcagaagcctcttaacaccacaatctccacgagcttaatgtgctaagaatggtttaaagaatctcctgctattattcaggttgatttcctattcttaaaataatgatggaataaaacaccttgtatcatgcatgtctgtgtatgaactttccattctaattagtaagatttttggagtcagaaacaaagtaactcactaaattacctaaaaatatagtataaaatcagggagaaaagatttccccttatttgtctccttttctagaatttaccacatacttcgtggacattaatacgtgacttccattggcagctgctctaatcctggtccacagagagttgacagagcatccagatgtggcccctgaacaatccctgctgcccaacagcactgacaccacgggaccctcaccccgtctccatccatgtctgggtgtgggcccttaccaggaccatgcccagtgcagcctcttcccaagttcatgtgattgggtcacaagagatggaatctaagtgagatgagagggactgagggaaggcatgggtgagtgtgagcaaacctgtcaggcaggacacttcttgagacccagagaagattcccaactccaaggcccagggtttctgaaaggaaagagacagaacaatccaccgagaatatcatctcacctgaggaagaaccattcctgacgcctttgctttcctcttccccttccgggtttcttcctcatgtaccaagagtccttagaagtcaatcctgaatgttaaaaatatgttgtttattgctcagaatcaatacaccccattcctgtaacataacaacacatacaaaggagacctcaccctgaggaaatatggtcccctctgctgcccactgcaccagagacgataaactcctacaggaaaactcccgcacccttctggagaagcccacaccacacccttctggaggagtccacacacgctgcagcagtggggagctgggctggaatgagctcctcttcagggcgcagacccagccctgaccaaaccccatgcagaaactgggtgcagtggctcatgcctgtcatcccagcactctgggaggctgaggcaggtggatcgcttaatctcaggggtttgagatcagcctgggcaacatggtgaaaccccatctttgccaaaaatacaaaaacatagccaggcatgaaggtacacgtctgtgtgtctatgttcccagctacttaggaagctgaggagacagaatcgcttaagctcaggaattagagaccagcctgccaacatgttgaaaccctctactagaaatacaaaaattgggctggccacagtggctcatgcctgtaatactagcactctgaaaggccaaggtgggcagattgtttgacgtcaggagttcgagagtagcctgggctacatggtgaaactccatctctactaaaaatacaaaaagtagctgggcttggtgggcgtctgtaatcccagctagttgggaggctgaagcaagagaatcgcatgaatctgggaagctgagattgtggtgagccgaaatcacgccactgcactccagcctgggaaacaacagggaaattccaactcaaaaaaaaaaaaaaactatgtagaccacgtgcggtggctctttcctgtaatctcagtactctgggcggccaaggcaggaggatactttgagcccaggattttgagactagcctgggaaacacagtgaaacctcgtttctacaaaaaaaaaaaaaagaaagaaaaagaaaactagccgggcttcttggtggctcatcactgtggtcccagctacttaggaagctgacgtaggaggattacttgagcccaggaggaccaggctgcagttaaagatcatgccactgcattccagcctaggcaattggccagaccctgtctcttaatgttagttaattaattaagttaaaaattatgtgttaacagaaagggatttttttctcacttcactgccccactccctaccccactctgggaaaagggaacagagtgactcacaagtgaataagtcactccactgtagctgaatagggattccaagtggaagctaacctctgaggccaacattcatagaatgtacatgtcttatagataggattcttaaaattctcaatctcatctgtataatttaagcagttttaagttactagattatatacaaagaagtcaaatgtcacaactaatcgtatccaatgaactcacccactcatctaaacccaaagtcctccgcccctttttttcttttgagacagggtcttgctctgttgaccaggctggagtgcagtgacatgatctcggctcactgcagcctggacctcctgggttcaagtgatccttctgcctcggccttcagagtagctgggattacaggtgcacactatcatgcccggttgtttttttttttttttggtagagatgggggtctcactatgttgcccaagctagactcgaactcctgtactcaagcaatcttcttgcctcagtctcctaaagtgctgggattacaggcgtaagccactgcgcccagcccatctttcttcattactgtgcttccctccctaattgtgtacatatctctcattctccccttctctctctagctcttgttttcttttctttttacctggcattctgctcctcattttgtacccctctcctctcctgctgtttatccccttcttccctctattccttctcttccacctcttctgctccatcctcgcaacttacctaacttcttgctgttccttctccccaatcgttctatcgtcctcaatcttgatatatttccgcctcttctcccatctctgtgcatcctctgctctccctgttaaattccgtcttccctgttataccccctgtccccaatatgtggaaccacagatccccaggtgtcctccctgctgtggttctccctctgttctccttgccaccagcaccactctgctctgtctgccctggctccaaatccctcctcctctccctcactctgatgagattccctctttgctgcccctctccctaccttgctgtccttcatctctctgtacatctaggtttctctacgtttctccagttacttttctcctcctgctttctttttttttcttttcacttttgctgtctcttgacaaatccatcacccaccctctactttgccctctgttatgggtctttctcattcttttctctgtctcagcttttctactgctctgtctcccaatgcctttggccgacacaatcacaggagggtttggataagacgcctgcatcccggaggagctcgttttccgggggctggagctgggcaggcaagaacaccccgtgtcacaggacaggccccgggtacctccccaacgcgggttcaggggaagaggtgactgtggaggagagacctgtggagcagcagggcccgccacgaggagggaggtgggggggagacggcgccttaagacaaggttggggtctgcaggattccaggaccaggcaaagtacgcggcctccctgggactggggccctggcgctgcgctccagtggcctacgaaggcgagggtgggaggcgcccagggcgggaatccagctctcgggtgaggactttaaaaagcgaggggcgggaggagtcagaaaacagttttgagcaggaaaactacgcgacaggaagtgtatacatcgccctacagcagaaagaccggggacagcccagcctcagggcgactttaaacccaaaaggaagcgatatccggactctcatggggacgtctcaatttgtcctgggtgaaggaagaagggagagaatttccaggtctgtggggaccccacgtctcaggtacagcagcgccggggacctggtaagcgcagacttaatagaagagcgaaactcaccgccacggtgtaactttcactccacataatccgcttccgggtttgcgcgcatgtgcgcgcgcagtacagaagccaggtctgggcggggcccgcgaggtgggcggggcctggatgaggtaggggcggggtgggaagccgagagactttcccctttagaaccagcagtgggcggggccagggcgggacctgtgagtctctcagcatcgttcccagcgcagaggcatttttcgggttttggaggcgagaccggccaggaaggctgaggcatgattcaaaagccctggaattatctggaacggggatgcaaactagaatgtgaaatgcaaagccctgcctgggcggaaggtacaatttcatgctgatagcccacagaaccgaatagaaatcctctccctttctattctccattcacttgggagagagtccacgctgtgctcagctttagagactcaggccactgcctgagatgcaggatggagtgctcaggccaaggatgggtgaggtcaccacctgcggcttaaacacagctgggatatgggcgcgggagtgggagcctgaggtcccagctattcaggaagcagcggcgggaggatcgccgagcctgggagttcaggccagcctgggcgacaaagtaacaccccctcccgcagggctcccttcctcgtctctctctctcttttcttttttataataaaatttttgatgatgttacatagggatccaacattattcttttccacgtggatatccagttagttgtcccagcgtatttgtgtaagagatctatcagtttctttttttgtttcttgagatggagttttgctctagttgaccaggctggagtgcaatggcgcgatctctgtctcccaggttcaatcgattctcatgcctctatctcccaagtagctgggatcacagggatgtgccaccatgccctgctaattttgtatttttagtagagatgggatttctccatgttggtcaggttggtctcaaatttccgacctcaagtaatccgcccgcctcggcctcccaaagtgctgggattacaggtgtgagccaccgcgcccggcttattttcttttatatatttagttttttctatttttttttttttttttttttgaggcagagttttcttttttggccaggctggaatgcggtggcgagatctgggctcactgcagcctctgcctcctgggttgaaccgattttcctgtctcagcctccggagtagttgacattacagacgcgcacaaccatgcccggctaatttttgtattttcgatacaaacgaggtttcactatattggctaggctggtctcgaacttctgacttcaagtgatctgactgcctcagcctctgaaagtgctgggattatagtcataagccacacttcctggcccaaaaaatattcatttctttactctttaaattttgagaaaatataatggaaaacaaaaaaaatcttccccccaatgagaaatcatcttcacgatgataatagtgaaagaaataaaaaccacattattaataagtaagccttaaaccagaatgtgatgggaaattgaggcaaacagctaagaggttgaaaagagacaaggaaacttcactgttctatacaacccattgagtacatgttttcaagataaacactaatcagtcctcagggaagaggacttgacaacactcttggtcacacatagttcatcctggctctatttggtaatggaggtgaccatctgtgtcagctaattagcttcatccagagggagggggaaaaccctaacccatgtctttttgacgagtgtgagttttacaacatagcgacgcgtgccctctctggtcaggcgcctacaatccgacagaaactgacgtcagcagtaaataataaaatttagaatgtaagattaagtactgagtttatgtgaacacaaagcttgaagaaagccacctggaaacaccaactccaaataaatgagatcggcgttccaaagtagagacgttaaggtttcacacacagggaaagacagagaatctttagcagaatcatgacagctttcattcaagcccagtgcataggttgcagcaacttgattggttatggattgatacaattcgaggaaggtcactttatcactccataagaagtaacaatgatcccatgaggtcttatctctggggctgcttagtcttcctaattattaacaggaaaactcttttttgtttttctttgagaggcagtattgctctgtcgcccagtggtgcaatctcagctcactgcaacctccacctcctgggttcaagcagttctactgactctaattgtcagtcctctctgcaaccagcgccccagtccacccctttactgaggtccctgccctccccactgcgctgccccagactgaggggggagttcgccccgactgcaggactctgcctgctcaaacaaggcgctttgcattaaaaccattttcaacttaagaggaaaaacgattcagtgttcagtacaggtgtcctactacaacatgttgttttatcttcgattgtctgaaacactaacttgaaatgggcaggaaacatccctgtgatattaggggtaatatcacggcacatcagaaccaatccaccaatcagaactcggaggatttagtccaggcgggcaagaggatgacagcaggcgacatctggggcccagctgaggagagagcccgaacccgacccttgccggcccccacccttcagaacaacaccccctccagaccccgcccccaagatgacgataaccctctggttctgccctttcccattgtatggcctggcccccaggcggcctcctccctcttgccccgccccagtcttgttccaggcaccgcccccacgctctagctctcctaggttcctgcttaagtttatacactcatggtccacagagtcctaagcagaaatatggaagacaccaagctctggtaatgtatctatctgacagactgagcgtctgcctcaagaacatagcaatagcaatactaagtgaaatattaggaagtttcacgtatgtatataattgatcatttattatttgcagctttaaattggctaaaattacatagcatgggtttttattttaatcaaatattagaaatatatcattcataaatggaatctaagcacacaaagttgaagagcatttccctatgttgaataaatatgaaggagttcagattttggaactgatttagtgctttccattacacttagttcttttcttttcttttactgttttttgagatggagtttctctcttgttgcccaggctggagtgcaatggcggcatctcgatcattttggaactgattttgtgctagtttttttcctattcttttttttctgtgttcatgagcttgtgaaccaaaagtatctaacaggtctcaatcaatttagaaatctcctttgccaaggttaaaaatgcacctgtgacacagcctcaggcggtcccgaccacaggtgcccaaggttttcaggctgcagtttggttttacatattttacagagacatgagacatcaatcaatacatataagatgtacattaattcggtctggaaaggtggaaaaactggaattggggggcttccgggtcacaggtagataataaattatcacattctttgagtgactcatcagcctttcactgaatacacaatttatatatgagagggagtagaggaatagtcacttatgccttaatctggctcattgactctgaatttttacataaatagggcaggggaagcagtcagataggcatttgactcaggtgtacagagggacgggttctgtcccacacctgtgcagataagctatcagtttacattgccagggtaaaattcaacagaactattttagggtgaagagcttgaggcttccagtttgtgaggggagtattgtagctttttttttttttttttttttttttttttgagacagttttgctcttgcccaagctggagtgcagtggcccaatctcggctcactgcaaccttcgcctcttgggttcaagcgattctcctgcctcagcctcttgagtagctgggattataggcaggcaccaccacgcctggctaattttgtatttttagtaaagaccgggtatctccatgtcggtcaggctggtctcgaactcccgacctcaggtgatcaactgcacccagcctctaactttttaaaaatccttgtagctatcttgtttaggaataaaacgggaggcaagtttgtctgacacagttcccagcttgacttttctctttggcttagtaatttttatttttctttcaccagcttgtgacagacataaggctttgacacactgatatttctttatatacattttccataacagtaaagtccaagggtctatcatgaactgggttagtggtgcatgtctgtgtgtctgtggtcccagctacttaggaagatgaggtgggaggattacttgagctcaggggttcaagaccaacctggtcaacatggtgaaaccctgtctctactaaaaatacaaaaattgggccgggcaccatggctcatgcctataatactagcactctggaaggctgagatgggcagattacttgaggtcaggagtgcaagaccagcctggccaacatggtgaaaccctgtctctactaaaaatacaaaaagtagccaggcttggtgggtatctgtaatcccagctactggggagactgaggtaggagaatcgctttaacctaggagtggaggttccagtgaacttgggtggtggaggttgtagtgagccgaaatcatgccactgcactccagctgggcgacagagtgagactcaaaaatacaataaactaaaaataaaaatacaaaaattagccagctttgtagcacaaacctgtaatcctagctacttgggaggctggggcacaaaaatcgcttgaacccaggagacagaggttgcagtgagtcaagaaacagagactgcactcacaggctggaccacagagtcagactctgtctcaaatagaaaaaaaaaaaaaaggcattaacgatgtgagtgatgcagagataaaaatcctgagcaactgtcgggcatggtggctcactcctgtaatcctagcacgttgggaggctgaggtgggtggatcaagaggtcaggagattgaggccatcctggtcaacacagtgaaaccccatctttactaaaaatacaaaaaattagctgggtgttgtggcatgcacctgtagtcccagctactcgggaggctgaggcaggagaattgcttgaacctgggaggtggaggttgtggtgaactgagattgtgccattgcactccagcctgggtgacaagagcaaaactctgtcttaaaaaagaaaaaaaaaaaattcctgagtaacgtgagagactgacaggcagaggaatcttcagatgggggtgggagggcatgggagacatctctgagcctagacctgaaggaggagaaagggacagtgctgtcatcatttaggtacatagtgtaagagcagggacaataacctgagacaggaagggttttgatgtttgggaaaagagaaaagcaactgtgactggggcagaggtagtcatgagatgagggcaagttcccaggaggaagctggacactggcaggggccctggacacagggctgtggagccacagtgaggagtggggcttttgtcctggggaacacgggaagctggtggagggttccctgccagggactgacatgacctgctttagatttcgctgtgatgtcctcacacagagaaaggccccgaagatggtctctgtgtctgagtctacaactctgtttcttccattcttctttttttttttttcatttttagggtactgcatcccatttaaaattctaattacaactggacagtcccctctcacagaaaaaaagccacatccagacacccactctattttgccaatcatttcaggggccagggtcactcaggttgagcttttccggtctagcccctcatctgcaagttgcagggaggctcactgaggctcagagtgaagacattttcaccgagttaccctgagaaggtctgagatgagtgaaaagatgtgtctgaattcttacatgtgggcctggaagggctaatgggaagggttggtctttatcacacccattattgaaaattaaagaagtgtcttccacatacctgggctaaaaaaacctcttttgcaaggttctgatgccattgactcccaacatttaattcttcattacaagaaaatcacagtaacatttataaaatgcagaagtgtgaacacacagttattgaccttgaaaacagtgaaagaaggtcagctgtagaactaagacatgagcaaatgttttcaatcaagaatacatgggtggccgggtgcgatggatcatgcctgatattgcagctttttgggaggtcgaggcaggtggaggtctcaggagtttgagaccagcctggccaacatggtgaaactccatttctactaaaaatacaaaaaattacctgggcatggtgacaggcacctgtagtcccagcaacttgggaggcagaggcaggagaatagcttgaacccgggaggaggaggttgtggtgagctgagatctcaccattgcactccagtctgggcaacaagagcaaaactccatcttaaaaaaaaaaaaaaaaaaaaagggggtgcttttggcacagcgttccgtgccaatccaacccatctttcaacatttgtccagaatggaccagagggcctgagggaaacatgcacttaatagcttacagctcaagattttaacaaatgacataaggaaagaaaactgaaaaatagactaactggttaaactacactttgatgttacggtaaaaggtcactgacatctttaccgggtacacactgaaacaatcaaacctctgcattaggtaccaaaggtttccaataaataataaagactagaaagcatgcacatctcgatttgaaccagacacaaacagaaactattttgaaattgttttaaaaaatataacaaattctggggtcaacaggaaaataactgaaaaacatacatgtacagaaaaaaatgatgtgagctgattataggatgcaacaaaggcatctttcagaagtgattatgtattaaaaaagaaattttgaaaactaagatttatcttggccaggcacagatgctcacgcctgtaatcccagcactctgggaggcaaagatgtgcagatcacctgaggtcaggagtttaaggtcagcctggccaacatggtgaaactccatctctactgaaaatacaaaaattagctgggcgtgctgacatatacctgtagtgccacctactcaggaggttgaggcaaaagaatcacttgaacccgggagacagaggttgcagtgagccaagatcatgccactgcactccagtgtgggtgactgagtgagattctgcccccccccaaaaaaaggataaagaaagaaaaatagaaaaatgaagaggaaacagaaaaaaaaataaagtaaatctattacacaagagaacaaaagcagttttcatgttcctgtttttgattttgtttattttttgtttgtttgcttgtttttgtgagatggagacttgctctgccacccaggctgcagggcagtggcatgatttcggctcactgcaacctctacttcccaggttcaagtgattctcgtgcctcagcatcttgagtagctgtgactacaggtgcatgccaccacgcccagctaatttttgtatttttagtagagaccaggttgcaccatgttggccaggctggtcttaaactcctgaccttaggtgacctgctcatctcaggttcccaaagtgctgggattacaggcatgagccaccatggtttgatattcctttaaaaaattatatgtaggccaggtgtgatggctaatccctgtaatgctggtactttgagggtccaaggcaggaagatcctttgcatcaaggaatttgagaccagcctgggaaacagtgaaatcccatttctccaaacaacaacaacaacaaaactagctgggattggtggctcatgcctgtggtcctagctactcgggaggccaaggtacgaggatcacttgacccccggaggtcaaggctacagttagaggagatcactccatggcactccatcctgggtgatagagccagatgctatctgaaaatattaattaattagttaattaaattaaaagtattattgaggcagaaattaaagaagaaagcaaattttcctctgctgagctcactcactccaaggatagtaacatgaaaggccatagaaaggtttgtggtgacccagtctaagaaactggatacatcccccccaactacacatggttaagaaaacaaattcctttactgtctctcctttcccagaatcattaattttgactatttttgcaaatgtctgcatgtctgtatttagcaaactctgtaagttcctgtttttcttttgatgcatctgcaaggtcacagctaagcaaggccacaagttataccaaggcagcagttatggtatagattacataacctgtcactgtatgatttactgtctttgtcctgcttctgtaagcttgcctatataagcccagctctgtctttgttctgggcttagctttctggatgtgagtccactgagctggtgtgcaccttaataaaactcctatgtttcacccattgatctctccagtcctctcatttcccacattatgtaataacagaaagtggtttttttcccacctcaccgccccacttcctacaccaccctgcaaaaagggaagagagtgagactctcaagtgaataaatcactatcctgtggctgaatagggattccaagtgaaaactaacctctgatgccaagatttatagaatgtacatgtcttatagataggcattttaaaattctcagtttcatctgtataatttaaataatttatttattatatacacagaagtgaagatgtcacaagtaatcatatccaatgaactcactcactcatctgccttggcctctagagtagctgtgagtacaggtgtgcaccatcatgccctgttaatttttgttttttggaagagatggggggtctcactatgttacccacactggtctcaaactcctggactcaggcaatccccttgcctcagtctcctaaagtgctgggattacaggcattagtcactgtgcctggcccctctgtcttcattactgtgcttccctccctaattctgtaaatatctctcattctccccttctctctctagctcttttttttctatttccctgggattctgcacctcattctgtacccctctcttctgctgctgtttattcccttcttacctctattccttctcttccacctcttctgcttcatccttggaacttatataacctcttgttcctccttctccccagtctttcaatcatcctcaatctccatatatttccacctcttctcccatctctgcacctcctcttttctccctgttaaattatctcttccctgttatacccctctgtacccactctctggcaccctagattcccagctgtgttccctgctgttgttcttcctctgttctccttgccaccagcaccactctgctctgtctgtcctggctgcaaatccctcctcctctccctcactctgatgagcctccctttttgctgcccctcttcctgccttgctgttcttcatctctctgtacatctagcttttctctacatttctccagttgcttttctcctcctgctttcttatcttttttttttttcacttttgtcacctcttggcaaatccctcacccctcctctactttaccatctgttatgagtctctctcattcttcttttctctgtctcaggttttctactgctctatgtctgtctcctgatccctttggcccacagaattgtggtaaaggttaaaaagaaaaagaaacaagttttcttctgcttagcagctcacttcaaggaaagttataagataacgctgtccaaaaagctaaggctaaagtaatgggctctagacactttttaaattccagaacaaagtgaaggaaaaaaaaaagagagagagagagaaagacaaattcttctactgttactcatttccctagtctcttaagcatgactatgttttacaaatgtctgtatttagccagttcttttttttgacacagctacaaggccaccagctatgtagaatccaacttctctaagactcatacaatataagccctatactgtaatcttgttcagtcccgctgctgttaaagttgcaggtgttgtgccttagatccaccacagtcagctgaaactggcagctcaagacaagtagacaagccagcaggacccagatcatccaactcatcctgagatgagatcaacctgctgctaaagaagactgcctgctctagtcactacggagtctgaccagtctatgcacagctgaagcttgagggaacaagccctgttctagtcacacaccagaagctgactagtctatgcatggctgaagcttgaaactccaggccctacctccacctccaccctctaaccaggcccagcttccaaagcagcctccaccctcttgcccagctccagcgacagttttcatgccctgccccctcaacgacctttcccttctcccgccgggtccccacccactgtccagaacccacccagacagggttgaaggcccacacacggttgttcttcagcactcgaggctgacacaggtgagtggtttttttgtcttcctgcttcaaacctggctttcgcagcaccccagcaccaattccagccacaccaggaatctgcatgctttgggatattgaaatcccccacgtgagtttgtgcagttgtcaggaagtcccaacttctccaagggaagcaggcaggctggtggctttgcagcttttgtatcgttttataaaatgatacaaaagatcttgtatgagccggtatgacacatctgacaactttacaggtaatattggagtattatatataaggcagttgatttgcaggactgctatgagagtttgggaacgtaaatacctatccagccaaaacgttcccattgtagaccagaaattcccgacccaagatcctcaatgggataacgacacagtccactaaaaattcatgaaagatataagggaaatgataattaaaggaattcaggagtcagtgccctgtgctcagaatcttccccgagcattttagataaaacagaaaaaagatgaaagccctaaaaactttctaaaaagactatgagaacaaatgagaaaatatgcacatttggatccagaagaccctagcaggcaagaaatgttaaagctacattttgttaccaatagctagccattggtagccatttagcaagccattgcaaaaaaagttacagaaactagaaaactggaaaaaacagtctatacgggaattcttagaataagctcaaaaagtatatgtaaggagggatgaagaaaaaccaaagcaaaaagaaaaattttctgacagaatgcaccagaggccaagcttaagcctccatttgccaggcctcacaaaagatatgagacaggggggccacagaactcaaagacaggtaaaaagggaaagcaaacccagtaccctaagactccaaaaactgaaaagggagagggacaagacaaatgttacaagtgtggaaaattaggtcatttcaaaagagaatgtcctgagtggagaaaggagaaaaaaaaatcccacttaaggaatttaaagaataaggaagtcaagggctctgtcttttctatctccagtcccactgagagcccgtggtaaatttaaaggtgggaccaaaacatgagcttgttacttttctttcttttttttttttgagacagagttttgttcttgttgcccaggatggagtgcaatggcgtgatcttggctcactgcaacctctacctcccaggttcacgtgattctcctgcctcagccttcccaagtagctagtattataggcatgtgccacaaagtctggctaattttgtatttttagtaaagatggggtttctccatgtgggtcaggctggtctcgaactctcgacctcaggtgatccgcccaccttggcctcccaaagtgctgggactacaggtgtgagccatggcacccagccgaacttattacttttctaatagactcaggagcttcccactcctctgtttgttttgtgccctctaatataaattgtttattagaagaacttcaagttttaggagtcaaaggggaaggatttaaagccaaagtctcagaaaaaacagaagtcagatttgaaacccgatcaaccaatgttaaatttttgctacttcctaaggctgggacaaacttgttaggaagtggcctaatggcaaagttaggtataggcttgcgtgtaagcccagaaggattcttcacttcattaaacctgtttactacagcagaagaaagctacatcaatgctaatgagtggtcaagggagggaaattgaaggaagctacaagttcctccaattcacataaagttaaaaactcccagggaaacagtgaaaagaaaccaatatccaattcccttagaaggtagattaggtttaaaacctctaattgagagccttatctgagatgggctacttgaactgtgcatgtctccctatactactccaatattacttgtaaagtagtcagattggtgatactgacttgtagaagatcttcaagccattaatcaaactgttcaaaccactcatcctgttgttcccaatccatatactattctcagcaaaattccatatgaccatcagtggtttacagaaatagacctgaaagatgccttctgggcatgtcctttagctgaagatagtcaggatatattcacttttgaatgggaagattctcactctgggtgaaaacaacaatactgctggacagtcttaccccaaggatttacagattctcctaacttgtttggccaaattcttgaggaggtgttagaaaagatgagcatcccaaagtgtatatctatgctccagtatgtggatgatatactagtgtcagggaaagctgtagaacaagtatctggcttttccatcagccttctcaaccatctctgtggagagggactatgtggtgtggtggcacacatctgaaatcccagctacttgggaggcttagaaaagagaattgcttgaatgcaggaggtggaggttgcagtgaaccaagattgtgccattgcacgccagcttgggcgacaagagaaagactctgtctcaaaaaaaaaaaaaaaaaaaagaaagaaagaaaagaaaagaaagaaagaaggaaagaaaaaacaggctgggcaaactggttcaggtctgttggcccagctggtctcaaactgctgacctcaagtgatctgcctgccttggcctcccaaagtgctgggattataggtgtgagcaactgcaccctgcccattcttcttgacgtaaacactttttatgtcaattaatgcttgaactcaatgttaagtcaactcaaactctagtcaatgcagaattgactctaatgtcaattaaagtttgtcattttctatagtcattgtatttgggacaattatctcaaaaatgaattttctactgttctgcaaggagtgacctcagactaaagacattgccacacctattccatttgtaagatttctgtccagtatagattccctgatgtctaatgcggtgtgaatgtaaagtaaagacattgccacactgggcgtggtggctcatgcctgtaataccagcactttgggaggccgaggcaggcggatcacaagatcaagagttgagagcaaccaggccaacatggtgaaaccctgtctctactaaaaacataaaaattagccaggcttggtggagcatgcttgtagtcccagctactcaggaggctaggaaggagaatcgtatgaacctgggaggtggaggttgccgtgagccgagatcacgccactgcaccccagcctggacaaaagagtaagacttcatctgaaaaaagaaaaaaaaatgactgccacaattatcacagttgtgaggttctctcccatatgaattctcctgtgttttgcataagatgaagcttgactgaagaccttgctgcaatcatgacatttgtaacgtttctttccagtatgagttcactgatgaactgcaagctatgaacaatgtctgaaatatctgccacatttactacacttgtaagatctctcttcattatggattctctaatgatttgcaatgcttgtagcattactgaggactttgtgagaatcattacatttgtaaagtttccctataccatggattgcttgatgatgaataagtgatgactgcccactaaaggctttgccacactcattgcacttataaggattttctccagtatgaagtctatgatggcatacaaaggatgacatatgactgaaggtcttgccacactcattgcacttgtaaggtttctctccactatgaagtctataatggtatacaaaggatgacatatgactgaaggtcttgccacactcattacacctgtaaggtttctctccagtatgaactctctgatgttgtgcaaggtttgactgttgattaaaaaccttgccacattcattacacttgtaaggtttctctccagtatgaattgccttatgaattagaagggatgaatttcgagcaaaggtcttgccacactcatgacagttgtaaggtttttctccggtatgaagtctacgatggcccacaagggatgacttctgactgaaggtcttgccacactcattacacttgtaaggtttctctccagtatgaagcctataatgacatgcaaggtgtgctttttgattaaaaaccttaccacattcattacatgtgtaaggtttctctccagtatgaactctctgatgttgtgcaaggtatgaatcacgctggaaaaccttgccacattcattacatgtgtaaggtttctcttcagtatgaactctgttatggcgtgaaaggcatgaattatgcctaaaagctttgtcacaaaccttacatttgtatggtttctctccagtatgaattcgcctatgtgtttcaagttgtgatctgcaactgtaaactttgtcacatccttcacatttgtaaggtttctctccagtatgacgtctacgatgccctacaagggatgacgtctgactgaaggtcttaccacactcattacacttgtaaggtttttctccagtatgaagtctatgatggcgtgtaagagatgacttgtgaccgaaggtcttggaacactcattacacttgtaaggtttttctccagtatgaactctatggtgccatgcaaggtattgcttttgatgaaacactttgccacatacatcacatttatattgtttctctcctgaatgggttacatgatgtcttcttaaatgtgagctataattaaaggctttgccacactcattacattggaaaggtttttctctcatgtgttcttcctggatttgtgtcaataatgaagaatggagaaagttcttcccatacctattagaaatatgggttttgagcctacaagaaattctttgggatgttgaaaccaaggaagcattgttgatagacttctccacttgattatcaattttcccttcagtctgaaattcgtgcagttcaggcagatgtgaataaaagcttgatccaagctgatctttaataggcttgtttccagcatgcctttgatcacgtcggtctgtactaccagtcaactttttgatttttgtcatgggtgcttcatggccatttcttttaatttcttgccactgaaactcaaagtcatgaatatctttcttgatttctgggaagcaaaaatctccaatgtgatgacttttatgtctttgcaatgtccctgtgtggatcacttctcctgtattaccgtgccctgttgatgagaactccgtcatggattttaaagagctatctaaaaaatataaagaccaataggtttccaattaagtacagatggtaaataatatttaatactgaaatgtgttaatattacacaaaaagcaatacttattttaaaattcccaaatatgatcttcaaagtttaagaacaccctgtctctattaaaaatacaaaaattagccaggcatggtggtggatgcctgtaatcccagctactcaggacgctgaggcaggagaatttcttgaacctaggaggcagagattgcagtgaacagagatcacatcattgcactccagcctgggcaacaagagcaaaattccatgtcaaacagagttcagtcaagagcctcatatatatgatgcagtaagcctgaatgatgtcctccctaagaggaatttctacagcagtgactgctgtttagagaacatgatcattagtttatgtgatgatcactgtcacagtaccagtgagagatgcttctgtgatgctccttaaaaaccagaacaaaaggccaagggtggtggctcaggtttgtaatcccaacacttggctagaggctgaggtgggcagattgcttgagacaaggagtttgagaccagcctggccaacatggtgattccccatctctaataaaaatacaaaaattagcaaggcatggtgacttgcatctgtaattccagttaggttgggaggctgaggtatgagaattgcttgaatgcaggaggcggaggttgcaatgagctgagatcacaacagtgcactccagcctgagcaagagagggagactctgtctcaaaaaacaaaacaaaacaaaagcagaatcacagctggaaacacttgtcagtcactgtcatgctttctagctcatctcctgggccaccctgacaattctgctcagggctaccaggggcatctctgcttagagcaggatgacgttcaattctattagtcaaagtgttcatgaatgttctgtttttatgtaaaaccactccataggatagtctctaagaagctgtctatgacagacaggaggatcatcactgcagaaaacaatgacatgtacatcaaaagcatgtatgcggcaaaatcacaaaagagaatacaaaaccaggaagagccaagatagacaagggcagattcctcacatcaggagggacattttcctcacccacagactccaggttcctgtagttctccaacatcacggccctgtataaagccctctgtgcagggttcaggcatttccactcctccaaagagaattctatagccacatccctgaaagtcaagcatccctaaaattaaacacacatttcaacaaaacattagggaggagtcattaccttcacacaaaatgagaaaagagaaaataagtattgatttgatccaagacggtgttctgacaaacccacattaaggtatttttgaacatttctttttgtgcagttgcattttattgtactttcccatgatagattttgaaatctcctagtcactgtggaagtctcagttttatggaaaatacaaaaaatatatgtctgggcacggtggctcacacctgaaatcccagcagtttgggaggctgaggtgggtgtatcaactgagctcaggagttcgagaccacccagggcaacatggtgaaaccaagtctctactgaaaacacaaaaacattaactgggtgtggttgtgcatgcctctagtcccagctatttgggaggctgaggtaggagtatagcttgagctccagaggcaaaggttgcggtgagctgagattgtgccactgcaattcagcttgggctgcagagtgagactccgtctctctctctctctctctatatatatatatagccaggcatgggggctcacacctataatcctgtcactttgggataccaaggtaggtggatcacttaaggtcaggagtttgagaccaacctgggctacattgtgaaaccccatatctactaaaaatagaaaaattagctgggcatggtgggggaatgtgcctgtaatcccagctatttgggaagccgaggcaggggaattgcttcaactctggaggcagaggttgtggtaagctgagatgacagcactgcactccagccagggcaacagagcaagtctttctcaaaataaaaatatatgtatgtatatattgcaaataatgtgttttctactaaaaccatgggcttggcttggcatggtggctcacacctataatccgaacacttatggaggctgaggcatgtggatcacaaagtcaagagattaagacaagctgggccaacatgctgaaacactgacactattaaaaacacaaaaattagcttggtatggtggtgtgcgcctgtagccccagctactcaggaggctgaggcagaagaatcacttgaactcgggaggctgaggttgcagtgagctgagatagtgccatttcattccagcctatcgacagagcgagactccgtctcaaaaaaaaaaaaaaaaaaaaaatcatgggcttctccattaatgctctcctggacacattgcaaatcacacctacacacacttcaattaacttcagtcgggacattataagcaaagacctagagaggacacatccacagctactcacgaggctgaggtgggaggattgcttgagcctggagagcagagtttgaagtgatccaagattgcaccactgcactccagcctgggggacacagcgagaccctatcacccccaccctcccaaaagttggaagctcattgaattaagagacaacttcaagaaatcataaatgcaatgcatgaagaaaatgagaaggtcagccaacatacagaaattacgaagaactacacagaaactctcgggctaaaaatacagtaactaaatggaaaaactcaatacatgggttcaaaatcagaatacattatgtaaattaaaaattagtgaaaaggggacaggtgaggtagctcatatcaggaatttgggaggctgaggtgggtagatcacttgaggtcagcagttcggagaccagcctcatcaatatggtgaaactttgtctctactaaaaatacaaagattagctgggtgtagtggtgggctccccactgcactccagcctgggtgacagagtgagactgtctcaaaaaataataaaataattttttaaaaaaggccaggcatgggccaggcacagtagctcatgcctgtaatcccagcactttgggatgccaaggcaggcggatcacctgaggtcaggaattcgcgaccagcctgaccaacatagagaaaccccgtctctactaaaaatacaaaattagccagatgtggtggtgcatgcttgtaatctcagttacttaggaggctgaggcaggagaatcgcttgaacctgggaggtggaggttgcagtgagccgagattgcatcattgcactccagcctgggcaacaagagaaaaactctgtctaaaaaaaaaaacaggcatggtggctcatgactgtaatcctagcactttgggaggccaaggcggggggatcacctgaggttggtagctcaagaccagcctgatcaacatagagaaactctgtctctactaaaaatacaaaattagccgggtatggtgatgcatgcctgtaatcccggctattcaaaaggctaaggcaggagaattgctttaaccatgaaagcggaggttgcaatgagccaagttcatgccattgcactccaccctcggcaaccagagtgaaacttcatctcaaaaaaaaaaaaaaaaagtagtgaataggaaaagaaacaacaacaaagaataaagaaaaatgaagggagtctaaacagactaacaggacaccatcaaggacaccatcctacacattatgaaagtcccaggccaggttctggctcatgcctgtaatttcagcactcacgcctgtaattccagcactttgggaagccagggtgtggggatcacctgaggtcagaagttcatgaccggcctggccaacatggtgaaatttcatctctaccaaaaatacaacaattagccaggtgtggtggtgcgcacctgtaacctcagttacttgggaagctgaggtgagagaatcgcttgaatccagaggcagaggctggagtaagccgagattgcaccactgcactccagcctgggtgacagtgttgggatttactcaagataggggcagaaatattaaagagaaatattagggaaagttatagggaatagtcacaaaccttttggaaggccgaaaggttatatagcttgtaataattgaacaggctgaaggcacccggttcttaccttagagcattaggtcatagggtaaatactagggacaatagaggcttccccagttaagcctgtttaccctacctccattaactaacctttgagccagatggccctctagcgggaggctgaccagggaaattgccccttaatggtatttacttcagatcacagtacctgagctttaatcattcatgaaactactctcttaaccatgctaattatcctcaagtgtgtttactcaaacttctgttgttaattctattctaaataaatgcctggagtgcgagctgctcagggccggctcttggtgtgcaggcgattgggcacccagcaggactggcaaagcagaatatctatgtgtcggtgtacgtttcattcatccgtctgggccagggtccgtgggcagacccccgcagctaatgccctcttgtgaggagcaatacctcagttgatgtcctgtgtgaggaaagtcagggatctgcagaaacagaccccccacagttcaagcctctcttgaggcaacctgtgaaggaagcgtgaggaccgccctcttgaggaaagctgcgatggaagcatgaggaacgcgacccccgaaaacaaaggcaaagaaggatttcgtggtcaagccagtgagtaatcagtaagtcattggtgcccactcgaggttaccaccttctgggggaagttgagtcaagctaaggtttcatcacgggacaatagttgtcagctcaacagaaacggtatataaaaatgttcagacagttgcttaaggctactggtcggaaacacagcagaactagcaaaacggaattatctgtgtgtcagtgtatgttttattcatatgtggtttaggtcagggttgacatgcagatcccacagctaatgctctcttgtgaggagcaatacctcaacagagcaagactccaactcaaaaaaaaaaaaaagagtaccagaagtcacagaagtgagtgagaagaagaaaggaacagaaaagcttgttggaaggcataatggcaaaaatttctaatttcaggatgcaaaagaaacaaattcaacaccttaagaatatccaacatggataaatctaagtaagagacctataacaaacaacatcataataaaactgtcaaaattcagagatagagaaagaatcctaacaacagccaaaagaagagctaactctcacccaagagggagctcctgtaatattatcaagatatttctcggctgggtgggcggtaactcacgcctgtaatcccacgaccttgggaggctgaggcgggcagatcatgaggtcaggagttcgagaccagtctggccaacatagtgaaacccatctctactaaaaatacaaaaaattagcggggtgtggtggtgtgcgactgtaatcccagctactcaggaggctgaggcaggagaattgcggtggtaagaccatggtggtaagaatcatggtggtaagaccacagtagtaagctttgcttaagtgagtgggaaattttgcatagtcttagtcagagagggcacctctgcagctgggggtagggatggaatcttcccacatctaaaagaggaaatggcaaatccaagaagaagcaatcagttttcaatgccccaacttgcaggaaacttccagatatctgcagtgaagtcaccatgctcacaggcagccagtgtgttattcttagcaacagtgaaaaactgtcaaggagattaagtgaagtcagggatttgagaccagcctggccaacatggtgaaatcctgtctctattaaaaatacaaaattagcccagagtggtggtggacacctataatcacagctgcttgggatgctgaggcatgagaatctcttgaccctgggaggtggaggttacagtgatcccagattgctccagtgaactccagcctgggcaataaagggagatagaatttaagatgacggggactgagaaaagccttgggtgagtgcgagcaaacttgtgacgcaggacgcttcagactcacggaagtctgcctactacaatacctggtatatcagaaaagagagagaagaatccactgaggaatatcactttacctgaggaagagccatccttgtctccttttctttggtcttcttggtggctttctcatgtaacatgagtctttggaaattaattctgtgtgagaaaaaaatatgatatttaattaattttttttgagatggagtccagctctgtcaccatgatggggttcagtgacatgatctcgtctcactgcaacctctgcctccccagttcaaggaattctcttgcctcagtgtaccaagtagctgggattcaagccatactccacgatgcacagctaatttttgtatttttagtagacatggggtttcatcatgttggccaggagagtctcaatctcctgaccttgagatctgcccacctcagcctcccaaagagctatgattacaggggtaaaccaccagacccagctgagatttaatgtttagaaaccacacattcctttcctgtgacaaaacatacacaggggagaccttacccggtataaagactgtcctctactgcccactgcaccagagatcatgcagagataagaaagccccacaggaagacctacaagggtaattttgacccattttcagatcttgctccctcctgaaaatgtccacacacacgctgaagcagggcacagaccttcaggacacagatctggccctaaccaaaccccatgcagagcacagccccctcacctccctgtggatcacagactgacctcagttctcaatatgggggaaactgccttgatgttcaatgctggacacagatgagaatcaccagcgccatcgtattattgagggtgtgtcccatcctatgataatagcaatctttgatagaatagcataaaagatgtatttgcaaaatgcctgagaaacctaatgtgaagtcagggttgagctccactcagagggtaccagctgagcacagccccaccttctggctctgctctccccttggggacttgttcccaccaggatccagtgaacagcgaaggagctaaaagaatcacacagaacaggtaacatggaccagaggtgggggtgaaggtggggctgcaatgtcaaatggggcctgtgggagatcacaaaggttactgtagataaagtgatgtcacaacaaagacttagggaagaaaggctgcttgtcacttgcagctgatgggacagagagtcctaggccgagggacagcccaggtgaaggccctgagacaggagcaacctcagccccagaaaaaggaaagaaacctgcgtggctggagcagagggagtgaggaggacacaggcaggagatgagatcagggaggtcctgggagcacagatccatagggatgaggtcttgaaatatttttctcccacacttcaaaagaattttggaaatgatgtattttctcacgcctttcatgtatacacacaacttttctttacgttataaattacaacatttacaaataatggaattcatttctcattttaaaaatacatgctgtcaagtttggctaagtccccagaagtaccctgtcaccctcatctgagacatgtaggactgcaagggaatgtgttcaggggtttaggaagtcacctatggaaatgtgcatttggagacgcctgtttaatatcccagcagagagctgaggagccaactgaacacaggattgcagagctcaggggagaggcctgtagggaacatggagtcgtgtaggtgggttaaagttgtgaaatgacacgatatggaagggcagtgggtgtggacagagacaaggagaggttcaagatgatctgagtctaattacctgttttttccattctggtacttgtgttttttatatttttggagaacagtaacttatttaaaattcatattacacctgagcattaccatctcgtatagaaaaagccacaaactatttggccaatcatttcaggggtcagtgtcactctgactgagcttttcttgtcttattcctcacctgtatattacagatgggggtcactgaggttcagagtaggagacatttcaccaagttatccagagaagctctgagttgagtcagaaggaggtgcggctcattcctatgtgatggactggaagggccaacagaatgtgttggttttttctctagaaaattgcaggatgggccaggtgtggtgactcatgcctgtaatcccagcactttgggaggctgacaggggtagatcacatgagcccaggagtttgagaccaacctgggcaacacggtgaaatcccgtctctatgaaaagtacaaaaaatagccaggcatggtgatgtgcatctgtggtcccagctatttgggaggctgaccagggaggatcacttggacctgggaagcagaggttgcagtgagccaagatcgtatcactgcactcaagcatggctgacagagtgacactccatctcaaaaaaggaaaaaaaaaattccaggaccatctgttatatacctgagcaaaagaaatgtctctttcaatgtctaaggtcctgatggcatgaatcctaaacatgcaattattttcccagaaaaatgacagtaatacgttcaaaatacacacaattgtgaacccctagctataggtatttaaaacactgaaagagaggcagtggtagaaatgagatctgagcaaatgttttcttcatgaacacatggactctgctggaacaaggttctaagtcaatccagcccatccttcaacatctgcaaagaatattatggaccagaggaacttgaggaaaatgtttacttagaggctcacagctcaccatttaatcagatgacatgaggaaagaaaatggagtaataggctacttgaactaaattttgatgttagtgtaaagaaaaaatttccttgatatctttattgagtacacattgaaacaacctaaaatcatttatcaggtaccagaaaatgtttccaatacataataaagactagaatgcaggcagtgctcaatctaaactgaacacaataaatttcagagaaaaacaattttaaaatggttaaaaaatatacatctaatgaaatgtgaggtcaaagaagaaaattcaaaacacatataatagtttgaaaatgataatgtgatgtcgtaagattctaccaaagcttatttgagaagcagttatttattttactttattttattttattgagacggagtctcgctctgttgcccggctggaatgcagttatgcgatctcggctcactgcaacctccacctcccggattcaagctattctcctgcctgtctccccagtagctggaattacaggcaagcatcaccatgctcagctaatttcagtatttcagttgagatgaggattcaccatgttggccaggctggtctcgaactcctgaaattaggtgatccaccagccttggcctccaaactgctgggattacaggtgtgagccactgcaccaggcctattttttttttttttttttaattaagaacaagctgggtgtggtggctcatgcctgtaatcccaagactttgggaggccgatgcggctggatcccttaagccctagagttcgagaccagcctgggcaacatggagaaagcccgtctctatgaggaacacaaaaatttgccctatgcggtggcatgtagctgtggtcccagctactctggaggctgaagtgggaggatccgttgaacccaggaggtttatgctgcggtgagctctgatcctgtaacagctctccaacctgggtgtcaaagtgagaccccatctccaattaaaaaaagaagaagaaggaaccactgggtcctgggtctaggggcagggaatctaaggccaattaacacgaacttttaagtccacgccatctgcttctgggtctgtgccaattagggcaggacaaaagccaggactggggggtggaaccccaggaggtgagccgggcctgagcaaggccaggaagggatgcagattaagtgggtggggcctgagtgaggccagggtggggcatgaaggacaaggggcctggtgtgggggggtgaggggggaagaggcctgggctgtgaggggttcgcaggggaatgaaggggtcagggcctgagcttccctctatctcactctccgtgtttctgttttccaggttttgaaggcgaaacccaccagtgaggctggaacagctcaggagtcagggaaatagtacctccctgagaagtgaacatggggtggtaattagatccaggaaagttccttactattgaaattaattttagcaatttaattccaaaacctcaaagttgtctagggcaggaatgcaaactagaatgcgaaatgcaaagtcctgcctgagccaaatgtacaattttatgctgacggcccacagaaccaattagaaatcctctccctttctattcttcattcactggggtgggagagtccaccctgtgctcagctccagagactttcctagagccactgcctggggtggggagcagagggctcaggccagggaggagtgaggtcaccacctgctgcttaaacacagcagggatgtgggtggggtggtgggagccaggagtcccagctactcaggaagcaggggtaggaggatagctgagctgggaagtccaggccagcctgggcgacaaagtaagaccctctaccccagagttccctcctccgtctcaataagaaaaaaagtgattaaaaaaaaaagcactgaccttgtaacagtgcatataaattgcccagttgttccttacatttgttattttatgctgcacttgttagatatgagttctaaatttctcttcaaagaatcaatgtgtcagtatgtgcaattatttgccttctacttttaaacttaacttcctcataaagcaaccttttttaatcacctgctccaccctgagtaattctccaacctgactcattccataatcatttttcccaccaaaccactcaccccatcactctttttaaattagccaatcggaattagcttagcctgtgcggtctaatcctagccgataggggaatgacacagcagcaggggcctcatgcgtctggagtaagaaccccttcctgtcccttgcccaagtgtgcactcaccattgctccatctatgaggacgcacccttctatagaagtaaattgccttggccatgtgcggtggctcacacctgtaatccccccactttgggaggctgaggtgggcaaatcacgaggtcaggagattgagaccatcctggctaacagtgaaaccccgtctctactaaaaatacaaaaaaaaaaaattagccgggcatggtgatgggtgcctgtagtcccagctacttggaagggtgaggtgggagaatggtgtgaacccgggaggcggagcttgcagtgagccaagatcgcaccactgcactccagcctgggcaacagagcaagactccatctcaaaaaaaaaaaaaaagaaagagacagagagtcaaagagagagagagaaagagacagagagacaaaaagggagtcaaagagagagggagaaagagacagagagtcagaaaagagagagagagagtagtagtagagagaaaacagtataccctattcctttaaaagccagggtaaatttaaaacctataattgataattgaaggtcttctccatgaccctataacactccaataccaccctgttgtcagtgtaaacaatggcatatcctgaaagcactgaggccactgacaacccatagcttacctatcaaaaatccttaacccagtaaaccgcggatggcccaaatgcattcaatctgtagtggcaactgctcagctaacagaagaaacagaaaaataacttttagaggaaacctcattgtgagcacacctcatcaaggaagaactatcctaagtcaaaaaaaaaaaaaaaaaaaaaaggcaaaatggtagcttactgactcaagaatcttcaagtatgaggctattctggtagaaaaagatgatttaacattaaccactgaaaattccattaacccagcaggttttctaacagggggtctaaatcttaattatttaccatgcaaaggtctgaccaggcctaggaggaactcccttccagacaggactatacagggtttctcccaggtgactgagggaaaaagacataatgggtattcaataagtgataaagaaactcttgcagaagcagagttaggaaaattgcctaataattggactgctgaaatgtgcaagctgtttgcactcagccaaactttaaagtagttacagaatcaggaaggaggccacctataccacttctaagttaatatggactgaacaaggtcttattaatagcaaagaattgaaatcccaaacttacaacgttttcaacgaaagtcaagtttgctaaaagttaacattgtaacatgtattatcctaacttctaatcttgtgaccttaggcagtctagttcacagacatgaaggaagttcactttgggaaagaatggttatcatctttgaaaaaaaaaaaaaaaaaaaggaggaaggagaatttatgtaaaaagaatgttatatggtaaattcttgtcctaaaataaatcaaatggtggtttaaagaaagggatgtttgcaacaattcagaaagttgaggcatgttgaagaattgtctgtcaaagttgtgaaaaaagaaaagttataagagggaatttatgcaagaaatgtcatataatttgaaagtaattagtcctcctgattgtaaaactgttgaagaaacagtttatgtgcaagttgtgtaaggaaagtaaaatatacttttggtaaaaggattatagggaggcagaagaatgtggatttttacctacattgaaagattaaaaaaatttgttttaaaggtttaagcaagtttcaaaatgttaattgtaaaggaaattctgtgtgtaaacatactggcaaaagttaaaggggtaatatccagtttttctgtgaactggatattaaaataaaagcacaaccagtttttcttaaagcactaacatgctcttcaacaaaaattataaaaggttaaagagtctataaaaatcttaccttatggtcagacattaacattggataaatatgtctacaaggttttattaaaattaagtttaacattaataaaacactaatataaaggtgaaatgtagcttatctggtataaaaatcatacatgaagtgttaaatataaaatggtatttggctttctttggtctaaaaactaataaaaataggtgctaaagaaaatttctcagcaagaaggcaccaaggattataaagtccactgctgatgtccccacgtttaaaacaaatgataaatttcttagaaattatatacttggtttatcctccaccttctcttcctttaaaacaagagtctctcagcacaggcgccagcttcggagtttccagtacatcagcatcggcctggggatgacgttctcatcaaaggatggaaagaatggaaactcgagccagcctaggaaggaccctatcttgtgctgctaaccactgagactgctgttcatacagcagaaagggagggacacatcacacctgagtcaagcaggtgccattatcatcagaatcatgggccactgttcctggatcaagccctaccaaattaaagctaaggaaagcttagtctatctatcttttcctttcctttcctttcccagtgcttatatccattactattcctaccactagcaactctaacccaactttagagcatttctatggtttaggagcagaggtcactggaaaggatcctataggcttctttagggtgtgcttttttctccctcctccacctcctacagctgcccctttcccaaatctatgaaatcaaactatgacatgcctcgtgccaaatgacaaaagcaagttctcagtagtagaaataggagacctaaggcaaaccatagctattgaaacagggtataaagatgtaaatgcctggctaaaatggatcaaatattccctctgcatgttgaacaaaggcaattgttatgcttgtgcacatggcaggccagaggcccagattgtcccctttccacgagggctgtcctccagtagaccaggtgtgggctggatgctagctcttttccaggattctacatcctggggtaacaagttatgccaagctctctctgtctgctatatcccaaagttcgacaccctgtgggtcagccctccagggccatccagcttccaactcccaacactaagttcactttatgtccctcatgacagggaggaaacttaacattccttggagacctgaagggatgcagagagcttaaaatttttcaaaagtttaccaatcagccactctttattcatccctgagcagatgcatagtggtattatggtggacctttactggacactttactgagtaactgaagtggcacttatgctttagtccaattggctatccctttcaccctggcatttcatcaaccagagaaaggaaaaataagacaccataaagcaaaagaagtcccttatgggtcttttgactctcacgtctatttagacacaattagagtcccatggggaagactagatcaatttaaagcccaaaatcaaatagctgcaggatttgagtcaatgttttggtgggtgacaattaataaaatgtaaactggataaactaatctatgacaaccaacagctatctattaattacactagagatgctgttaaaggaatagctgagcaattaggggctaccagccagatgtcttgggaaaatgggatagcctttgacatgatattagcataaaaaggaagagtttgcatcataattaaaactcagtgttgtaccttcatcccaaacaacactgcgcccattgaaagtaaaacaaagacattgcaaggtctgactgctctgtccaataagttagtgaacaactcaggggtaaatgaccccttttcaggatggctagaaaagtggttcggtagatggaaaagaatagtagcctcaattcttacttccctcacagccgtaatgggtgtacttattcttgtcaggtgctctgtcacaccatgcatccgtgggttggtgcagaggctcataaaaatggcagttactaaaatctcccttaactatcctccaccttatccaaagaagcttcttcttattttggaaaatcaaaccgaatgactaagccaagacatgttaaagaagtttgaagagaaagagctgtaaggaaaatgcaagagaagggaatgttagatatgagttctaaatttcttttcaaagaatcaataagtcagtatgttcaattctttgccttctacttttaaacttaacttcctcataaagcaacctttttcgatcacctgctccaccctgactcattccaatcacctgctccaccttgactcattctgatcacctgctccaccctgcctcattccaatcacctgctccaccttgactcattctgatcacctgccccaccctgactcactccgattacctgctccaccctgactcattctccaccctcattccataacatttttcctgccaaaccactcaccttgtcactctctttaaattagccaattggaattagattagcctgtgtggtctaaccctcgccaataggggaatgacacagcagcaagggccatgtgcatcagaaataaccccttcccctcccttgttcaggtacgcactcaccattgctccctctgtgagggcacaaccttctatataagtaaattgcctttctgagaagaaaaaaagaaaattttatatttggtgctatttcttttgcagcaccgaaactttatttacaacacacttaaaatgagttatatttgtcatggaaaagagtcaaactctgtaaaatattttaaaatatttattctgcactaaatatgaataatcatggcccatgacacaactctcaggaggtcctgagaacatatgtccaaggtgatggggaacagcttcttcttagacattttagggaggcattagacatcaatcaaatacatttaaaagatgcattaattttgttcagaaaggtgggacaactcaaagtgggagcttccaggctacaggtaaatttaaacattttctgattagaattggttgagtttgtctaaatacctgggatcaatagagaggaaatgttcaggttaagataaaagatgttggagaccaaggttcttttgaagtcctctgctggctgccttcagagaaaatagatgatgaatgttttttattcagacctttaaaaggtgttagatttttagttattctcttcaggattggtagggcctagaagaaaaagatctagctatgttaacagagattctttgcagacgcacatgaacccctcacaaacgatacctttgaaggaccatttcaaaatatggcacagaaacatgttttgaggtcaaatattttgactttcttctttgccatatgttttgtggtttgtaaggcatgaccccctagactctttacataggaatttggacaagataaaaaaatcagagcttacacctcattctcaaatacttttttttacagttcttccctgcaatataactacttttacgataaatgttgttgacaacataatatgctaacatcaataatttataaatgtattgtaatattaaattcactctatgtgccttctgaaaaaattagaaaatgtaccttttatcttcaagttgtactttttttttttccttcagacaggacctagttctgtcaccccggctggaatgcagtggcaggaacactgctccttgcaccctcaacctctggtgctcaagcaatcctcccgccacacctcccaactagctggagctgcaggccctcaccaccaagcctggctaatttgttagtactttgtagaggggtggtcccactatgatgctcaggctagccttcaactcctggactcaagcgatcaacccacctttgcttcccaaagtgttggggttacaggcaagccaccacacccatccaattgcaatctattttaggtgttttctttgttattctctcctgagtgttctatcaggtgggaataacaaaggctataaaatatgcagtctttaaatgttaggatttattttcatatagagaaagatcatgaaatattactaagaatacattgcagtcaagttattccgttttacttgggccctgaaaaaatataactaagttataaaattggctgggcacattgactcacacctgtaatcccagcactttgggaggtcgaggcaggtggatgacccagaggtcaggagattgagactagcctggctaacatggtgaaaccccatctgtactaaaaatacaacaattagctgggtaaggtggcacaaaactgtaatctcagctactcaggagattgaggcaggagaatctcttgaatccaggaggcagaggttgcagtgagcaaagatctcaccacagctctccagcctgagcaaaagagtgagattctgtctcaaaaaaataaaaataaaaataaaatgaaattataaatcacctcatttctgcatgtaatacttttatgactatatctgtaagttaacatgtactatgaactatgtttttctcccacatccctagctatggaagaattcatctatcaaacactagtaattagctaaaatatgattacatttagaagggaaattagcatatctagaatattagcaagtttaaaaaagcataatgtcgtcaggcatggtggcttgtgcctgtaatccgagcatgatgggaggctgaggcaggaggatggctagtgcccaacagttggagtccagcctaggcaacatagcacctcatctttatgttttaaaaattaattaagttacttatttatttttgagattgagtttggttcttgttgcctaggctggggtgcaatggcacggtctcggctcactgcaacatctgcctcctgggttcaaatgattctcttgcctcagcctcccaggtagctgggattattggtgctcgccatcatgctgggttaatttttgtatttttagtagagacggggtttcaccgtgttggccaggctggtctccaaatcctgaccttccaaagtgctgggattacagacatgagccaccgtgcatggcaaaaaagtttattttaatcagaaataattaataaatagaacatgataatgggtacaaaaaatagaataagacctattatttcataacacaacagaatgactgtagtcaatgattaaattgtacatataaaaatggggatggccaggtgtggtggctcaaacctataagccctgtctctaccaaaaatacaaaaaaaactggatgtgagcctgtaatcccagctactcaggagactgaggcatgagaatcacttaaacccagggagcagaggttgcagtgagtggagattgcaccactgcattccagactgtgcgaaagagctggactccatctcaaaaaactaaacaaatggctgggcacagtggctcatgcttgaatcccagcactttgggagccaagatgggtggatcccctgaggtcaagagttcgagaccagcctgaccaacatggtataaccctgtctctaaaaaaatacaaaattagccgagggtgatggcgcatgcctgtaatctcagatattcaggaggctgtggcaggagaatcatttgagccaagaaggcagaggttgcagtgagctgagatcgcaccactacactccagggtacacaagaagagtgtaactccatcacacacacacacacacacaaaatgctataaacagaacatcagaaaaaaaatatagaaagtcacatgtatttaaaaaccttaagcttttgaaagctgttttcccaagtaatcaaaaatgagccaataacgatgcaaatattatctttttgttttttgttttttctggagacagagatcatgcaactgcactctagcctgggtgacagagtgagactccaactcaaaaaaataaataaataaaaaattattaggccaggagcagtggctctttgggaggctgaggtgggccaatcacctcaggtcaaaagttcgagaccagcctggtcaacatggtgcaaccctatctctactaaaaatacaaaaaattaaccgggcctggtggtgtgtgcctgtaatcccagctactagggaggctgaggcaggagaattggttgaagctgagaggtggaggccgcagtgagtcgagatcatgccactgccctgcagcctgggtaacagagtgagactccatctcaaaaaaaaaaaaaaaaaaaaaaattaccaatgtcaactgaacttggaaagcaccacacatttgcacactcacacagacacaaccctctgatatggctctagaccaaatccacaggttaaaaagccctcaaatgaactcttgggccttaagcctttcaaaagatcacctgtttcctgtgaggttggggctgtggccctgatgtgtgaagacttaggaccatcctgtcatcatagaaaccctaaacaaaataaagaaggaaatttacctcaacaatataaaagaccatccatgaaatgaccacagctgaaataaccaatcaggaaaaattgaatgcttttcctgtaggatctcacatgatgctagaacgttctcaccctttctattcaatcaatactgactgtcctagccagagcaatgaaatagcaaaagaaatcaaactcatccaaatcagaaagaaataaataaaattttatttgtttgtagatgacacgatcctctgtgtagaaagtcacaaagactcaaccaaaatacaagtggaactaataaacattcagtggatttgcagagtacaatattagcaccaaaattagttgaatttccatgcaataacagtaaaaaattttaaaaggaaattaagaaaacacttccattttctagagaatttaaactaagatatacttaggaataaacgtaaaaatgcgagaagtttctaccttgaaatctatgaacattgatcaaaatgattaaaaacatagagatacaaccaatattgatagattggaaaacttaatctcgttaaatgattatacaacccaagatgatttagatttaacacaacgcccatacaaatccctatcagtttttgtcaaagaaacaaaaaaccggctgggaaaagtggctaacctctgttggccaggctggtctaaaacttctgacatcaagtgatctacccaccttgggctcccaaagtgctgggattacaggcatgagccaccacggccagctactctaagctatttctgacaagacagtgaaatgagtgacacaggaaaaggggcatctaatcaccaatgtcactgaaggctgacaaatcttattaaacaaaggaagttcagaatctgtactataaagcttgcgttacttgaagccatctaatagcattaacttgttttaaaaacctgggggcaaattaacattacttctcaaataaggacaccaggcccacagtgttcatgtacttcaccccaatttgcatgtacggtaagtgagggacaagacttgatcctaggcctgaaggatcccacgacatgtacttaagcacaatagtatgcccaggcagtacaggaaatgaccagtcacagaaaatacaagaacagaaagaaatatatcaagggggatacaagggctgagctgggacacaagcgctgagctgcgctgctgacagtggttctgaagccatccctcatggatcatgtgctgagtcatcataccctgcacacactgatttaagcggcctcctataattttgtccagtggatgaacaaggtcttgacttactcagtgagagtggtgttggaggggatgggctcacggggaaattggggtgttcagcattacaaaatcgataggctgaaaagaaacagtatttgcatccagatcaatgtaccatgtgatgcaaggccaggaaaggaagggcaagggtggagggcagaagtaatgggcatgtaggagtgaattttgtgcatgcatgtctgtgggaatataattccactaggatagaccaaatcttgagcttggacgaaagtggaactaatttagcaaatggtaaaatattgaccagaggttaactatacaaattacaatatgggcaaaggacaagaatgaacgacattcaggccaggtgcagtggctcatgcttgtaatcccaccactttgggaggccgatgcaggcagatcatgaggtcaggagttcaggacagcctgaccaacatggtgaaaccctgtctctactaacaatacagctctcgctctccctctccctctcccgctcactgcaacctccctgcctgattctcctgcctcagcctgctgagtgcctgcaattgcaggcgcgcgccgccacgcctgactggttttcgtatttttttggtggagacggggtttcgctgtgttggttgggctggtctccagctcctaaccgtgagtgatctgccagcctcggcctcccgaggtgccgggattgcagacggagtctcgttcactcagtgctcaatggtgcccaggctggagtgcagtggcctgatctcggctcactacaacctccacctcccagccgcctgccttggcctcccaaagtgccgagattgcagcctctgcccggccgccaccccgtctgggaagtgaggagcgtctctgcctggccgcccatgtctgggatgtgaggagcctgccccggcccggctagcctccccgtccgggagggaggtggggggcagcccccgcccggccagccgccccgtctgggagggaggtggggggcgcctctgcccggccgcccctactgggaagtgaggagcccctctgcctggccaccaccccgtctgggaggtgtgcccaacagctcattgagaacgggccaggatgacaatggcggctttgtggaatagaaagcggggaaaggtggggaaaagattgagaaatcggatggttgccgtgtctgtgtagaaagaagtagacatgggagacttttcattttgttctgcactaagaaaaattcctctgccttgggatcctgttgatctgtgaccttacccccaacccggtgctctctgaaacatgtgctgtgtccactcagggttaaatggattaagggtggtgcaagatgtgctttgttaaacagatgcttgaaggcagcatgctccttaagagtcatcaccactccctaatctcaagtaatcagggacacaaacactgcggaaggccgcagggtcctctgcctaggaaaaccagagacctttgttcacttgtttatctgctgaccttccctccactgttgtcctatgaccctgccaaatccccctctgtgagaaacacccaagaatgatcaattaaaaaaaaaaagaaaaaaagaaaaaaaaataaaggaagaagatacaatcaaaaaaacaaaaacaaaaacaaaacaatcaaaatcagcctgcagttcacaccacaaagcatgagtgagactgggctggaagttggtgaggggcattttgcttttgaatattaaagacagacaaattgagaagtaaaaaaaaaaaaaaaaaaaaaaaacaaaaattagccgggtgtggtggtgcatgcctgtaatcccagctactcaggaggctgaggcaggagaattgcttgaaccctggcagtggaggttgcagtgagctgagatgtggccacttcacaccagcatgggtgacagagtgagactctgtctcaaaaagaaaaaaagaaaaagagatccaaaaaatcagcagtatggcggtctgaggtaaaagcagttttacgtctcttaaattaaatggcctctgatttccagtgtcaaatgaatactcaacaaaatcccccttgtagattgcagaattgtgtatacacatgaaaaaatgagtaaactctatgaagagtacagcaatgggggagaccacaggcgtgaagaatgatccctagctgagtaggtagagatcggtttgtgaaaaaagagccaggccagaggggatggctcatgcctgtagtcccaacactttgggaagtggaggtgggtggatcatgaggtcaggagttcaagaccagcctgactagcatgctgaaaccccatctctactaaaaaaatacaaaacattagctgggcatggtggcacgtgcccatcatcccagctgctcgggaggctgaggcaggagaattgcttgaacctgggagtcggaggttgcagtgagccaagattgcaccactgcactacaacctgggtgacagagtgagactgtctcaaaaaacaaaacaaaacaaaaaacaaaacaaaacagacccagatggagattgttgcctacatgtgtgattggtcaaattagtgaagaaaaacaataatgcgctaactaaaatggttgcatatgaaaattagaggataaggccaggctcggtggctcaagcctgtaatcctagcactttgggaggtcgaggcaggtagatcacaagatcagtagttcaagaccagactggccaagatggtgaaaccccgtcttactaaaaatataaaaattagccaggcatggtggcaggcgcctataatcccagttacttgggaggctgaggcaggagaatcacttgaacctgggggacagaggttgcagtgagctgagattgcaccattgcactccagcctgggtgacagagcgagacttcatctcaaaaaaaaaaaaaaagaaaaaagaaaaaaaaactggagggtaaatcttgtttcttatgtaaaaacaagggtgtctcttttcctggttcctatattatttgaagtcatatccctggacttttaaacacaatctctggaataaatgagacatgaaaagtgaaggtgacagactagcaaatgccaggccctcatatcctcatggagacaccaactcaacaaaaatgtttcatcaaaaatatctttgtaggccaggcatggctcatgcctgtaatcccagtactttgggagaccaaggtgggtgtatcacctgaggtaaagagttcaagaccagcctggccaacatagtgaaaacctgtctctactaaaaatacaaaaattaagccaagtgtggtggtacatgcctgtaatcccagctactcaggaggctgaggcaggagaatcacttgaacccaggaggccaaggttgcagtgagctgagatcacacaactgcctccaccctgggtgacagagcaagactccatctcaaaaaaaaaaaaaagaaatgaacactaaaatatagggatttcattcaacctcacaagctcccttaataagattgatgaaaaccatatctgttacagggttgattctacaacaaattgaacaaaggttttcttgttaaaaatgaacagtgacacatattggtgtgaaaaatgtgaaatgaacaacagttcagtcaagagcctcataggaggctgtgagcccaaatgacatcctcagtaggaggaattttaacaccactgactgctgcttagagaagacgatcattagtttatgggatgaacattgccacagtgccactgagagaagcttctatgatgctcctcaaaaaccagaatggctcaggcatggtggctcatgcctgtaatcccagcactttgggaagccaaggtgggtgggtcacctgtggtcaggagttcaagacaagcttgggcaccaagatgaaactccgactctactaaaaatacaaaaactggccaggtatggtggagcatgcttataagccctgctacaagggaggctcaggcaggagaattgcttgaacccagaaggtggaggttgcaatgagcacagattgcaccactgcactccagcatgggtgacagagggagactgtatctcaaaaaataaataaataaaagaaagcatgacagctggaaacacttatcagtcagtgtgatgctttctatctcataacctggtccacgctgacaattctgctcagggtttccagggcgcctctgcctagagcaggatgatgttcaatcataacagtcaaagtgttcttcatgaattttctgtttttatgcaaactcactccataggggagtgcctaacaagctatccatgactgataggagggtcatcactgcagaaaacaatgacacgtacatcaaaagcatgtatgggggctgggcacagtggctcacacctgtaagcccagcactttgagaggctgaggcgggtggatcacctgaggttggggttcgagaccagactgaccaacatggagaagtcctgtcgctactaaaaatacaaaattagccaggcgtagtggcacatgctggtaatcccagctacttgagaggctgaaggaggagaattgcttgaaccttggagacagaggttgtggtaagaagagatcacaccactgcactccaccctggacaacaagagggaaactgtctcaaaaacaaacaaacaagaaagcaggcatggggcaaaatcacaaaacagaacacataaccaggcagagccaagatagacaagagcagatttctcatgtttgcagggacattttcatcacccacagactctaggtacctgtagctctcccacatcacttccctgtataaagccctctgcgcagggttcaggcatttccactcctccaaagagaattctatagccacatccctgaaagtaaaatgtccctaaaatgaaacacacatttccacaaaacatcatggaggagtcagttatcaccttcccacaaaatgagaaaagagaaaataagtactaatttgatcaaagactgtgttctgacaaacccacgttaaggtattttggcacattttttctccacagttgtgttttattgtacttttccacaaaatattttttttttttttttttttttttgagacggagtctcgctctgtcgcccaggctggagtgcagtggcgcgatctcggctcactgcaagctccgcctcccgggttcacgccattctcctgcctcagcctcccgagtaactgggactacaggcgcccgccactacgcccggctaattttttgtatttttagtagagacggggtttcaccgtgttagccaggatggtctcgatctcctgacctcgtgatccgcccgcctcggcctcccaaagtgctgggattacaggcgtgagccaccgcgcccggcctccacaaaatattttaagatcccttaagtcactgtggatgtctcggttttatggacaatgtaaaaaatatacaaataaaaaggaaacacagggcttggtgtggtggctcatgcctgtaatcaaaacactttgggaggccaagccgggcagatcatttgaggtcaagagttggaaaccagcctggccaacatggtaaaacctcttctctactaaaaatataaaaagtagccaggcatggtggcaggcacctgtaatcccagctacacaggaagctgaggtaggagaatctcgagcccaggagacggaggctgcagtgagttgagatcacaccactgcactccagcctgggtgacagagtgagactttctcaaaaaaaaaaaaaaaaaaaaagcaaacgaacatagagttttctctacagatagtatgttcaacataacaggtgatattcattacctagatgagctgaaatacaagtggtgtctagagaggacaaagtccaatgaatttgatagaaaagaaaagagagtaaagtccaaaactgaaaactgttgtgatgacagcaatagccatgaataacatttttgaatgcttcccatgtgctatacactgttctaagtgcttcccatgtcttaagccataaaataacatactgtcccatgaagaaagatctgtacttggagacaagtgcatcacacatactaggaaaattaccacaaatcaaatagctaaaaatgtcaacacaagcactgaatccagatgtctgggattcagatttgaatataaccacctaagtaaaagatacagcttcaaaactaaactgacacaggtttatctaatggagagaacatgaaataggttcaagggtaagaacatggagcatcctacaaggtcattgaatggacacacagggcatgaatataatactgtacaatccttcttactatttttccttttaagacagagtctcactctgtcaaccagcctgaagtgcagtggcacaatctcagctcactgcaacctcgtttgcccaggtctaagcaattctcctgcctcagcctcccaagtagctgggattacaggcacctgccaccacacccagctaatttttgtatttttagtagagacgaggtttcaccatcttggccaggctggtattgaattcccgacctcatgattcaccctcttcagcctcccaaagtgctgggattacgggcatgagccaccgtgcctggcctgtttttactattaactcattattgtgatagttgacaacaatgaaaaatacttaaaattattaaaattataaaaaaaaaacttattgcaaatgatgtgttttctacgtaaccatggacttatccatccatgtattctcccaagatgggaggatccctagaggtcagtagatcaaggctatagtgagctatgattgcaccactgcacttcaccctggacagaataaaaatacaatataaaaaataattctggaagtggtggctcatgcctgaaatcccaacactttgggaggctgaggtgggcagatcacaaggtcaggagttcaagaccagcctggccaacatggtgaaactccatctctactaaaaacacaaaaattacccaggcatggcagtgcatacctgtagtcccagctactcaggaggctgaggcagaattgcttgaacccaggagtcagaggttgcactgagctgagattgcaccactgctctccagcctaggcaacaaagcgagactccatctcaaaaaacaagaaaaagaaaaagaaaaagaaaaagaaaaagaaaaagaaaagatgtagctatgtgtggtgacacatgcctatccttctagctctttgggaggctaaaatggggatcacttgagcccaggagttcaaggctgctgtaaactagaattttgccattgtactccagacctgggccacagagcgacaccttctctctctgtctctctttttttttctagatggagtctctctctgttgcccaggctggagtacagtggcaccatctcggattactgcaacctccaccttccgggttcaagtgattctcctgtctcagccttttgagtagctgagattataggcatgtgccaccacacccagctaatttttgtatttttagtagagatgaggtttcaccatgttggccagctgctctcaaactcctgacttcaagtgatccacccgccttggcctcccaaagtgctggcattacaggggtgagccaccacagccagccccacatttacattatggcatcttgacttgatcctcagctcctcagctgccctgtgactctgtgtgtgtgtgtgtgtgtgtgtgtgtgtgtgtgtgtgtgtgtgtgtgtgtgtatgctcacgtgttgtgacaggcaaggaaaagccagtagagcatcatcgccactggcctggcaggaggaggtggccctcgggctgcagttcactgtgctgtttgcactctgattcttggaagaatctttcctgaagtcacggagcctccagctcctccggaacagaactagttgtgtaggagtgtgtccttcatgcccctcaggtccctgaccttctccccacccttcctgaagggaatccaaagggaagggcaaagtccctgcccataatggccaaactgggtcctggtgatgtgcagagcatggaagacctgggagctggagtgaggcagttcacacagatgacaaaaatggagatgcctcaggactggctgaagatgcagggtctggtctgtagggcttttctgaccttagagaggccttctcctcttattttgactaaaacaaattgccacaggaagtttagatcaattagagttgaaatttccagaagaaatgtgggaacatcctcacatttgccccagcccctcagtcttccgaggacacctcagcatctaaactgcaaccccagagtaggtgctgctgttgtcctgtggccaagatggtaattgtgcatccttcaagtaagggagacacaacacacaaagtaatccatgcagaagggtgtttctgggcgggcacagtgactcccgtctgcaattccagtacaccgggagaccaaggcaggtggatcacctgaggtcacgagtttgagattagccatgccaacatggtgaaaccctgtctctactaaaaatacaaaaattgagctgggtgcagggctcatgcctgtaatcctagcactctgggaggccgaggctggtggatcacttgaggtcaggagtttgagaccagcctggccaacatcgtgaaactgcatctctactaaaaacataaaaagtagcctggcttggtgggcatctgtaatcccagctactcgggaggctgaggcaggagaattgcttgaactctggtggtggaggttgtagtgagccgagatcacaccactacactccagcctgggtgacagagtgagactcaaaaataaaatataataaaataaaaataaaaatacaaaaattaaccaggtgtggtggcacacccctataatcccagctacttgggaggctgaggcacaagaatcacttgaagctaggagacagagattgcagtgagccaagatcacaagagtgcactcatagtttggacaatagagtgagactctgtctaaaaaaagaaaaaaaaaggaaagaaagaaaaagtgcttctgatatgattgatgcagagataataaaacctgagtaacgtgatagagactggtgggcagagggaacttcagatgtgggtgggagggcatgggagacagctctgagcctagaactgaaggaggagaaagggacaatgcagtgatcatttagggacatagggtaagagcagggacaatgacctgagacagaaaaggttttggtgtttgggaaaaaaaaaatgtgactggggcagagggagtcatgagatgagggcaagctcccaggaggctggacactggcaggggccctggacacagggctgtggagccacagtgaggagttgggcttttgtcctggggaacacgggaagccggtggagggttccctgccaggcactgacatgacctgctttagatttggctgtgatgtcctcatacagagaaaggccccgaagatggtctctgtgtctgagtctaccgctctgtttcttccattcttctgcttttcttcatttttggggtactgcatcccatttaaaattctagttacaactgggcactcccctctcccagaagaaaagccacacccagacacccactctattttgccaatcatttcaggggccagggtcactcagggtgagcttttctggtctagcccctcatctccaagttgcagggacgctcactgggctcagagcggggacattttcaccgagttaccctgagaagatctgagatgagtgagaaggtgtgtctgaattcttacatgggggcctggaagggctaacgggaagggttggtctttatcacccctatccttgaaaattacagaagcatctttcaaatacctgggctaaagaaacttcctttacaaagttctgatgccactgattcctgacatttaattcttccttaaaaaaaaatcacagtcacattcataaaatgcagaagtgtgaacacacagtaattgaccttgaaaacagggaaagaaagtcagctgtagaactaagacgtaagcgaactgtttcaatcaagaatatatgggtggtcaggcacggtagctcttgcctgtaatcccagcacattgggaggtcgaggtgggcagatcacctgaggtcaggagctcgagaccagcctggcaaacatggtgaaaccttgtctctactaaaaatacaaaaaatgagccaggcatggtggcaggcaactgtaatcccagctactcaggaggctgaagcaggagaatcacttaaatcctggaggcaaatgtttctgcaagctgagatggcaccattgcacttccagcctggggaacaagagtgtaactgtcacaaa[132 bp omitted]cagctcaagattttaacaaatgacataaggaaagaaaactgaaaaatagactaactggttaaactgcattttgatgttaaggtaaaaggtcactgacatctttaccaggtacacactgaaacaatcaaacttctgtatgaggtaccaaagttttccaataaataataaaaactagaaagcatgcagacctcgatctgaactggatgcaactaatttcaaaccgaaactatttttaaattgttttaaaaaaaaatctaacaaactctgaggtcaacgggaacttaactggaacatatacatgtacagaaaggaatgatgtgagctggttataggatgccacaaagccatctttcagaagtgattaagtattaaaaaagatactcttaaaactaagatttttctcaaactccaactgcaaaaaaattacatatatatatatatatatatataaataaatgagaaaccagaaagaaaaaaaaaaagaaatctattacacaacaagaacaaaagcacttttgataccccttttattttttattttttgtttgtttgtttttctgagatggagactcgctatgccacccaggctgcagtgcagcaacatgatttcagctcactgcaacctctacctcccaggttcaagtgattgtgtacctcatcttcctgggcagctggaactacaggtgcacgccaccatgcctggctaagttttgtatttttcatagagacggcgtttcaccatgttggccaggctgctcttgaactcctgaccttacgtgattctctcacctcggtctcccaaagtgctgggattacaggcatgagataccacacctggctttgatgtccattttagaaagtactatgggctgggtgcagtggctcacatctgtaatcccagcactttgggagatcgaggtgagcagatcacctgaggtcaggagtttgagaccagcctctctaacatggagaaaccctgtctctactaaaaatacaaaattggcccagagtggtggcgcatgcctgtaatcccaactactcaggaggctaaggcaggagaattgcttgaacccagaaagcagaggttgcactaagctgagattgcaacattgccctccagcctgagcaacaagagtaaaactccatctcaaaaaaaaaaaaaaaagtactatgtaggccaggcgcagtgcctcaaccctgtaatcccagtactttgggaggtcaaagcaggaggatcctttgagcccaggattttgagaccagcttgggaatttaaaaccccgttttacaattatatatatagatatataatttatatagctatataaattataatataaattataatttatatatatataatttatatagctatataaattataatataaattataatttatatagctatataaattataatataaattataatttatatatctatataaattataatttatatagatatataaattatatataaattttatatataaattatatatataaattatatgtgtaaattttatatatatataaattttatatatatatatatataatgtatatatatataatgtgtatatatatatataatgtatatatatatatatatatatataatgtatatatatatataactagccgggcttggtggctcatgtctgaggtcccaactactcaggaggctgaggtaggaggatcacttgaccccagggggccaaggctgcagttagaggagatcacgccactgcactccagcccgagtgatacagccagaccctgtctcaaaatattaattaattaaattaaaagtattgtgtaataacagaaagtgatttttgttgcacttcactgccccacgtcctaccccaccctgggaaaagggaagagagtaacttccaactcaataagtcactgctctctggctgaatagggattccaactggaagctaacctctgatgccaagatttacagaatgtacatgtctcatagacaggaattttaaaattctcaatctcatctttataatttaatcaagttttaaattattagattatatacacagaagtcaacatgtcacaactaatcatagccaataaactcacctactcatctgatcccaaagtccccctgccccttcttttctttggtaacagggtctcactctgttgaccaggctgcagtgcagtggcatgatcttggctcactgcagcctggacctcccgagctcaagtgatcctcctcccttggcctccagagtagctgggattacaggtgcgcaccatcatacccgattaatttttttttttttttggcagagataaggatctcactatgttgtgcaggctggtctagaactcctggactcaagcaatccccctgcctcagtcttctaaagttctgggattacaggcatgaaccactgtacccagcctctctttcttcattactttgcttccttccctgattctgtacgtatctctcattctccccttctctctctagctcttgttttattttcccccggggttctgctcctcattttgtacctctctcctctcctgctgtttatccccttcttcactctattccttctcttccacctcttctgctccatccttgtaacttatctaacatcttgctgctcttctccccaatcttttgatcatcctctatctctatatggacagaaatttaaaaataataagtactgcatttattcactccaagaaaagtaaaagctaaggcccacaatgtggcaaggcaaggtttaaaaataaaaagaaaagaacaagttttcctctgcctgtcaagctcacatcaagaacggttacaggataacgctgtccgaatagccaagtctaaatgaatgggctccagacacccccaccttccagagcaaggttgaaggaaaaaaaaaaaaaaaaaaaaaagagagagattattttactgttactctttttccaggcttcttaagcattattatgttttacaaatgtctgtatttagtcagttcttgtttttcctttgatgcagctacaaggccaccggcaacccaaggtcacaagatatgttatgctatagattacacaacctgtcactgtataattaactgcttttgttttgcttttgtaaggccacttataaaaaccctgctctgtctttgttcagtgctcagctttttggatatgaatccactgagccagtgcgtacctaaaataaacaattctgtttctctcatattggtctctccattcttcagtttcccctaacacaaatatttccgcctcttctcccatctcagcgcctcctctgctctccctgttacattctctcttccctgttataccctcatccccactctctagcactccagatccccaggtgtcctccctgctgtgcttctccctctgttctccttgccaccagcaccactctgctctgtctgccctggctccaaatccctcctcctctccctcaccctgatgagcctccctctttgctgcccctctccctaccttgctgtccttcatgtctctgtacatccagcttttctctacatttctgcacttgcttttctcctcctgctttcttatcgttttcttttcacttttgctgtctcttggcaaatccctcacccatcctctactttgccatctcttatggctctttctcattcttcttttctctgtctcaggttttccactgctctctgtccgtctcctgatccctttggcccacacaatcacaggagggtttggagtaagacgcctgcatcccggaggagcttattttccaggggctggaactgggcaggcaagaacaccccgtgtcacaggacaggccccgggcacctccccaacgcgggctcaggagaagcggtgactgcggaggagagacctggggagcagcagggcccggcacgaggagggaggtggggggcgacggcgcctgaggacaagggtggggtctgcaggatcccaggactaggcagaggacacggcctccccgggacaggggccgcggcgctgcgcttcagaggccgacaagggcaaggctgggaggtgcccacggcgggaatccacttcgcgggtgaggacgttaaaaagcgcggggcgggaggagtctgaaaatgattttgagaaaaaaaaaaaaaaaacaacaacaactacgcgataggaagtgtatacattgccctagagcagaaagacaggggatgggaccaacctcagggcgactttagacccaaaaggaagcgacttccagactctcacggggatgtctctatttgctctgggtgaagacgggagagaagttccagatctgtggggaccctaggtccgagggacagaaacgctgaggacctgggaaatgcagacttaatacaaaacagcgaaactcaccgccgcggtgtgaccgtcactccacgcgatccgcttccagatttgcgagaatctgcgcgcgcaggacagaagccaggcctcggcgggccccgcgaggtggtgggcggggcctgggccgggtggcggcggggcgcgaagcagagagactttgcggtttagaaccggcagagggcggggccggggcgggacctgtgtgtctcacatcctggctcccagcgcctctgtttttcgggtttgggaggcgacagcggccaggaagtatgaggcatgattcaaaagccctggaattttctggaacggggatgcaaactagaatgtgaaatgcaaagccctgccagggcggaacataggatttcatgctgacggcccacagaacagaacagaactcctctccctttctattctccattcacaagggagggagggtccgccctgtgctcagcttcagagacttccctaaagccactgcctggggtgcgggacggagtgctcaggccagggaggagtgaggtcaccacctgctgcttaaacacagcaggggtgcaggcgcgaaggcgggagcctgaggtcccagctactcaggaagtaggagcaggaagatcgctgagccctggggtccaggccagcctgggcgacaaagtaacaccccctcccgcaaggccaccttccttgtctccctctctctccgtctctctctctctctctctctctcgctttttaaacctttttaaataaaatttttgatggtgtgacatagggatccaacattattctgttccgtgtggatatccagttagttgttccagcacatttgtggaagaaatctattacttttttttcacgtttttcttttctttttctttgagggagtctccctctgtcgcccaggctggcgtgaaggggcgtgatctctgctcactgcgacctctgcctcctgggttgaagcgattctcctgcctcagcctccggagtattacagtattactggtattagaggcacgagcgaccatgcccggctaatttttgtatttttgatagaggcgggctttcaccatgttggccaggctggtctcaaactccgaacttcaagtaatctacctgcctcggcctcctaaagtgctgggactacaggcgtgggctaccttgcatagcctaaggaatgctctttactgtttaaacgttgagaaaatataattgaaaacaaagaaaatcttcccccaaatgggtaattatctccacgacaacagagaaataaataaaaaccattttaataaagaaccttagactcaaatgtgatgggaaatagaggcaaacagctatgaggttgaaaagagagaaagaaatgtcactgttctatacaacccattaagcacatgttttcaagataaacactaatcagtcctcagggaaggggatttgacaaccccttgggtcacacatacttcatcctggctttacttggtaatggaggtgaccatctgtgtcagctaattagcttcatcccgagggagggggaaaaaccctaacccatgtctttttgacaagtgtgagtttcacaacatggggacaggtgccctctctggtgagactcctacaatacgacagacactgatgtcagaggtaaataataaaatttagaatatatgattaagtgcagagtttgtttgaacacaaagcttggaaatagccacctggaaacatcaacttcaaatgaataggatcagcgttctcaggtggagacgttaagattttacacacataggaaaagacagagaagctttaccagaatcacattttccattcaagaccagtgcctagggtgcagcaacttgactggtgatggattgatacacttcaaggaaggttactttatcactccataagaagggacaatgatgccaaaaggtcttaactctggggctgcttagtcttcctaattatttacagaataacctttttttttttagttgtttgtttgttgttgctgtcattttttcagacagcgtctagctctgtcacccaggctggagtgtactggcactatctcggctcactgcaacctccacctcccgggttcaagcagttctcctgccccagtcagccaggtagctgcgattacaggccagtgcgaccacgcctggctaattgttttctgtttttagtagatactgggtttcaccatgttgggcttctccattaatctctcctgcacacttcagaccacatccacacacacttaaatcaacttcagttcagagatgagaagcaaaaacctagagaggacacatccacagttactcaccaggctgaggtgggaggattgcttgaccctggagagcagaggttgaagtgactcaagatcgcaccactgccctccagcctgggggacatagtgagaccccgttacccacatccaccaaaaagttggaaatgcattgaaataagagacagcttcaagaaactataaaagcaatgcatgcagaaaattcaaaggtcaaccaacatacagaaactatgaagaactacacagaaactcttgggctaaaaatagagtaactaaatgaaaaaacgcaatacatgggttcaaaatcagaattcattaggtaaattaaaaattagtgaagaggggatgggtgaggtggctcacaccaggactttgggaggacaaggtgggtggatcacttgagctcaggagtttggagaccaacctggccaatgtggtgaaaccttgtctctactaaaaatacaaagattaacagggtgtggtggtgagctcctgtagtcccagctactctaggggctgatacaggagaagcacttgaacatgggaggcagaggttgcagtgagccgagatcaccccactgccctccagcctgggcgacaaagcaggactgtctcaaaaaataataataataataataataaaataggccaggcctggtggcttatgcttgtaatcccactataaaaaaaaaatacagaaaattagccaggcgtggtggtgggcacctgcagtctcagctactcgggaggctgaggcagaagaatggcatgaacctgggaggtggagcttgcggtgagctgagatcatgccactgcactccagcctgggcgacagagcaagactccatctcaaaaaaaaaaaaaaaaagaaatttatccttactacttactgtctacacatagataatcaaaggcaagtagttaaagacatagttaaaaatatgacaaaactggccgggcatggtggctcaagcctgtaatcccagcactttgggagaccgaggtgggtggatcacaaggtcaggagatcgagaccatcctggctaacacggtgaatccccgtctctactaaaaatacaacaaattagcagggtgtggtggcgggcgcctgtagtcccagctactccggaggctgaggcagaagaatggcgtgaacccgggaggcggagcttgcagtgagccgagatcaacccactgtactccagcctgggcgacagagcaagacttcgtctcaaaaaaaaaaaaaaaaaaaaaagacaaaactgacacatgtgcccatacaagtgtagcatggattcaaccctgatgccatgtttagaaagtagttcccagcactaggaggatttaaaactcttataataggagttattatagtaatagaaacctgcttactgctgccttgtttgctacctgtacttcttcaaacgataaaaagcttcatcgctattttagttcaccaaaatgcttcagcacaagtgtactatatgaatcactatcaatctgttgcacaaaaagacataagcagcaaaaataagagtgagaattcccactaataaaaagtgagactctcaaaggggggaaatgagggaagagagagagaccctctcatattgttttatattgttttatactcagtacctgttttaagaaaaaaacaaggaagtgaaaccaaaggcaggcatcccgatgccaggcatcagacctaaaaccagacctgaaaccaggcctcggcctgcctggcctaaacctagtaattaaaattccacccctgacctagcaactgatgttatctatagatcccagacattgtatggaaggacattgtgaaacctcctgttctgttctgtttcactctgaccaccagcgcatgcaccccctgtcacataccccctgcttgctcaaatcaatcactaccctttaatgtgaaatctttagtgttgtgagcccttaaaagggacagaaattgttcactcagagagctcggattttaagacagtagcttgccaatgctcccagctgaataaagcccttccttctacaactcggtgtctgagaagttttgtctgtggctcatcctgctacaacctgagggcaggagttcaagactagctgggccaaaatggtgaaaccccatctctactaaaaatacaaaaaaaattagttgggggtggtggcactggactataatccccaactttttgggaggctaaaacaggagaattgcctgggaggcagagtttgcagtgatctgagatcatgccactgaactccagcctggataacagagactttgtctcaaaaaaaaaaaaaaaaggccagaagaggtggctcacgcctgtaatcccagcactttaaaacgctgaggcggacggatcacgaggttatgaaatccagactgtcatgactaacaaggtgaaataccatctctactgaaaataccaaaaaattatccgggcgtggtggcactcacgtgtagtcccacatacttgggagcctgaggtaggagaatcacttgaacccaggaggcagagtttgcagtgagccgagatcacgccacagcactccagcctggctaccgggtgagactccatctcaaaaaaaaaaaaaaaaaaaaattaaccggccatggtggaactcacctgtggtcccagctacttgggaggctgaggttgggaaatggcttgagcctgaaggaggttgcagtgagctaagatcacgccattgctctccagcctaagcgacacagcaagaccttctctcaaaataaaatcaaatatatgaaaacagaataactcaaagtacaaaaatccattttgttgatataggtccacaaaataataaaacagagactcgcaagaaactacatgctaataaaaaaaagttgtcattttccccagatcttttctttcttcctttttttttttttttttttttttttagacagggtctcgttctgtcgcccaggctgcagtgcagtaatgcaatcttggttcactgcaacctctgccttctgggttcaagtggttctcctgcctcagccacagagtagctgggattaccggtgcccaccaccatgcccggctaacttctgtatttttagtaaagatggggtttcaccatgttggccaggcttgtcttgaactcctgagctcaggtgacccaccaacctcagcttcccaaagtgctaggattacagacatgagtcaccacatccagcaaattttcaaaatatatacatatatgtgtgccaatgtgtacgtatatgtatgtgtgtgtgtgtgtgtatatatatatataaagatttttaaaatataaaaagtagcaagttttgtttaactgaagaggaatctcatcttgctggaaacggatactttgatagttggggacagggaggaatcttgtcagatctaagaaaacaggaaatgtcccctcctagaggaagcaatcaccctttcaactgcctgacatggaggaatctttagatatctgtaggaatgcaggcatgctcagatgcagccactatggcactctttatacagagaaaaattgcaaaggacccacatactgtcattcagccaatttccaatgcagatgtcaaagagcaagctagccatgtttactaacataacaacatgtaaattttcacaactagcaggatgaaatatcaaagtaaaatatttactaaaacacaaagaaaacaatagacgctggggtctaggtgagggtggagatggggaggagagaggagcagaaaaaatagctaatggggctgggcacagtggctcacgcctgtaatcccagcactttgctagggcaagggggttggatcacctgaggtcaggagttcaagatcagcctggccaacatggtgaaaccctgtctctactaaaagtacaaacattagccaggcatggaggcatgtgcttgtaatcccagctactcaggaggctgaggcaggagagttgcttgaacccaggaggcagaggttgcagtgagccgagatcatgccatcatactccagactcaaaaaacgagcaaaactcagtgtcaaaaaaaaaagaaaagaaaaaaagctactgggtactgggcttgataccggtgtacaacaaactccaatgacatgagtttgcctatgtaacaaaccatcacatgtagccccaatcctaaagtaaaaacataactataaaacattttatttttttaatttactacggaattatttttaaagtctcataatgatgcagaaatacaggtgtacaagacttgctctgacacttggcacagaactgacagtagcggctccccagtgagtttggaaagagggtggaggacgtgacagggaaaggagatgctttgtggcaaagggtctgcagctttgctaagagttttactagaaaacaaatatatccatcctgtgatgtttaaatatcaaaatatatatttaataaacattggtagagctgagcacggtggctcgtgcctgtaatcccagcactctgggaggctgaggtgggtggataacctgaggtcagaactttgaggccaccctggccaacatggtgaaaccccatctctactaaaaatacaaaaaaattagccgggcgtggtggcacacgcctataaccccagctacttgggaggctgaggcaggagaatcacttgaacccagaagacagaggttgcagtaaactgagatcatgtcactgcactccagcttgggtggcagaggctgactccatctcaaaaaataaattgtaaccatttttaccaaaaacacctgtttcacaagcctctccacagtaaccccacagtctccatgagcttaatgtgttaagaatggtttaatgaatctcctgctattatttaggttgatttcctattcttaaactaatgatggaataaaacaccttctatcattcatgtctgtgtatgaactttccactctaattagttcgatttttggagccagaaacacaataactcactcaattacctaaaaatgtagtatgaaagtgaagcggtgggttgcccctccacacctgtgggtgtttctcgttaggtggaatgagagacttggaaaagaaaaagacacagagacaaagtgtagagaaagaaataagggggcccaggggaccagggttcagcatatggaggatcccgccagcctctgagttcccttcatatttattgatcattttggggtgtttctcagagagggggatgtggcagggtcataggataatagtggagagaaggtcagcagataaacacgtgaacaaaggtctctgcatcatagacaaggtaaaaaatcaagtgctgtgctttagatatgcatacacataaacatctcaatgccttacagagcagtattgctgcccgcatgtcccacctccagccctaaggtggttttcccctatctcagtagatggaacatacaatcgggttttataccgagacattccattgcccagggacgggcaggagacggatgccttcctcttgtctcaattgcaagaggcgtgccttcctcttatactaatcctcctcagcacagaccctttacgggtgtcgggctgggagacggtcaggtctttcccttcccatgaggccatatttcagactatcacatggggagaaaccttggacaatacctggctttcctaggcagaggtccctgcggccttccgcagtgtttgtgtctctgggtacttaagattagggagtggtgatgactcttaaggagcatgctgccttcaagcgtctgtttaacaaagcacatcttgcaccgcccttaatccatttaaccctgagtggacacagcacatgtttcagagagcatggggttgggggtaaggtcatagattaacagcatctcaaggcagaagaatttgtcttagtacagaacaaaatggagtctcctatgtctacttctttctacacagacacagtaacaatctgatctctctttcttttccccacatgaaagcaggcagaaaagattttcacttattggtttccttttctagaatttaccacgtactttgtgcacattaatacgtgacttccattggcagctgctctaatcctgctccacagagagctgacagtgcatccatatgtggcccctgaacaatcccttctgcccaacagcactgacaccacgggaccctcaccccgtctccatccatgtctgggtgtgagcccttcccaggcccatgcccagtgcagcctctttccaacttcatgtcactaggtcaccagagatggaatctaagcgagatgagagggactgagggaaggcatgggtgagtgtgagtaaacgtatcaggcaggaagcttcagactcagagaagattcccaactccaaggcccagggtttctgaaaggaaggagacagaacaatccaccgagaatatcatctcacctgaggaagagccatccctgactcctttgctttcctcttcctcttccgggtttcttcctcatgtaccaagagtctttaggagtcaatcctgaatgttaaaaatatgttgtttgttgctcagaatcaacacaccccctccctggaacacaaccacacatgcgaagtgtcacgcacgtctgtgggaagaggccaccaaacacgctttgtgtgagcaacgaggctgtttatttcacctgggtgcagccgggctgagtctggaaagagagtcagcaaagtgtggtgggattatcattagttctcataggttttgggacaggcggtggagttaggggcaatgctttgcaggcagggggtggatctcaccaagtccattctcaagggtggggaggattacaaagagccttctgaagggtgggggagattacaaagcacattgatcagtcagggtagggcagaaacaaatcacaatattggaatgtcatcagttaaggatatttttacagttgcttcaggctatctggatgtatacgtgcaggtcacaggggatatgatggcttagcttgggctcagaggcctaactaaagacctcaccctgaggaaatagtgccccctgctgccctcctcaccatggatgataaactcctacagggaaactcccgctccccttctggaggagtccacacacaagctgcagcagtggggagctgggctggaatgagctccccttcagggcacagacccagccctgacgaaaccccacgcagaggctgggtgcggtggctcatgcctgtcatcccagcactctaggaggctgtggcaggtagatcgcttgaactcaggagtttgagaacagcctgagcaacatggtgaaaccccatctctaccaaaaatacaaaacttcgccaggtatggtggtgcacgtctgtgtgtctgtggtcccagctacttaggaggcataggtgggaggatcacttgacctgaggagtttgagagcagcctggccaacatggtgaaaccctgtatctactaaaaatacaaaaatgggccgggcgtgtgggtcatccggtaatcctagcactctggaaggccgaggtgtgctgattacttgaggtcaggagatcgagaccagcctggccaacatggtgaaacgctgtctctactaaatacacaaaaagtagccgggcttggtaagtgtctgtaatctctgctattcaggagactgaggtaggagaattgcttgaacccgggaggtggaggtcgcagtgagccgagatggcgccactacactccagtcttggtgacagacagactcaaaaataatataaaatggaagttaaaatacaaaaattagccgggtgtggtggcagacacaccagctacttgggaggctgaggcaccagaattgcttgaacccagcagacagaggttgcagtgagccaagatcaagaggctgcactcataggctgaaagatagagtgactctgtctcaaaaaaaaaaaaaaaaaaaaaatgcatttctgatgtgattgatgcagacaatgaatcctgagtaacgtgatacagactgatggacaagggaactacagccgggggtgggagggcatgggcgacagctctgagcctagacctgaaggaggagaaagtgacagggtacgtagggtaaaaccagggacaacgacctgagacaggaagggttttgatgtttgggaaaagagaaaagcaaatatgactggggcggagagagtcatgagatgagggcaagctcccaggaggaggctggacagtggaaggggccctggacacagggctgtggagccacagtgaggggttgggcttttgtcctggggaacacgggaagctggtggagggttccctgtcagggactgacatgacctgctttagattttgttgtgatgtcctcatacagagaaaggccccgaagatggtctctgtgtctgagtctacctctgtttcttccattcttctgcttttgtttttcatttttagggcactgcatcccattgaaaattctaatcacaactgggcactcctctcctcaaaaaaatttaaaaaaaaagccacacccacacacgcactccattttgtcaatcatttcaggggtcaaagtcactagggttgagcttttctggtgtagcccctcatcgccaagttccaaggaggctcactggggctcagattggaagacattttcaccaagttgccctgagaaggtctgagatgagtgaggtgtgcctgaattcttacatgggggcctgcagggactaatgggaagggttgatcttatcacccccatcctggaaaattagagaaggctctttcacaaacctgggctaaagaaatttcttttgccgggcacggtggctcaagcctgtaatcccagcactttgggaggctgaggcgggtggatcacctgaggtcaggagtttgaggccagcctgaccaacacggagaaaccccgtctctataaaaatacaaaattagctaggagtggtagtgcatgcctctaatcccaggtacttgggaggctaaggaaggagaatcacttgaacccgggagacggaggttgcagtgagccgagatcgtgccactgcactcaagcctgggggacaagagcgaaactccgtctccaaaaaaaaaaaagaaaagaaaaaaaagaaacaaacttcttttgcaaggttctgaggccattgactcctgacagtttgttcttccttacaagaaaatcacagtaacatttataaaatgcagagttgtgaacacatagctattgaccttggaaacagggaaagaaggtcaggtgtacaactaagacataagcaaattgtttcaatcaagaatacatgagtggtcaggcacggtggctcacgcctgtaatcccagcactttgggaggtcgaggtgggcagatcaccagaagtcagtagtttgagaccagcctggccaacacagtgagagcctgtctctactgacaatgcaaaaacctagccaggagtggtggagggcacctgtaatcccaactacttggtaggctgaggcaggagaatcacttgaacccaggaggcagacgttgtagtgacaccagatcgcaccattgcagtccagcctgggcaacaagagcaaaactccatctcaaaaaaaaacccccaaaaaaacaaaaagaaaaacaaaaaaaaaaccgaggctgggagcagtggctcacacctgtaatctcatcacattgggaggccaagtcgggtggatcacaaggtcaggatttgagaccagcctgacaaacgtgatgaaaccccgtctctactaaaaatacaaaaattagccaggcatgctggtgggtgcctgtaattccagctactcaggagactgaggcaggagcatcacttgatcccaggaggcagaggttgcagtgagctgagattgcaccactgccctccatccaaggcgacagagcaagattccatttcaaaaaagaaaagaaaagaatacacgggtgcttttggaggagcgttctatgccaatccagcccatgtttcaacatttttccagaatggaccagagggccttgagggaaacacgcaataaatagctcccagatcaagattttaacaaaggacataaggaaagaaaactgaaaaacagactaactggttaaagtacattttgatgtttagttaaaaggccactgacatatttaccaagtacacactgaaacaatcaaacttaagtttaggtaccaaaggttttcaataaataacaaagactagaaagcatgcagacattgatatgaactggatgcaactaatttaaaacagcaactattttgaaattgttttttaaaaaaatctaacgaattctggggtcaaccggaaaataactggaaaatatacaagtacagaaacgaatgatgtgagctgattataggatgctgcaaaggcatctttcagaagtcattatgtattaagaaatacaacttttataacttagatttatctcaaactcaaactgcaaaataaataaataaataaataaaaaataaagagagaaatgaagaggaaccagaaagaaaaagaaggaagtccattatacgagaagaaaagcatttttgaggtctttttttgttattttttgtttgtttgagatggagactcactctgccacccaggctgcagtatagtggcacaattttggttcactgcaacttctacctcctaggtttaagcaattctcatgccccagcctcccaagtagctggaactaaaggtgcacaccaacacccccggctaacttttgtatttttagtagagatggggtttcaccatgttagggtgcttttgaaattgtgaccttaggtgaccagttcacatgggtcgaccaaagtactctgattgcagggatgagccaccacgtaccgaggctttgatatccttttttttttttttttttttgagatagactctcactctgtcgcccaggctggagcccagtggtgcgatctcgactccctgcaagctccgcctcacaggttcatgccattctcctgcctcagcatctggagtagctgggactacaggcgccagccaccatgcccagctaattttttgtatttttagtagagacagggattcaccctgttagccaggaaagtctcgatctcctgaccccgtgatctgcctgcctcggcctcccaaagtgctgggattataggcatgagcctccgtgcctggcctcatatcccttttaaaaattactatgatatatccctttcaaaaagtactaactgaaaaaagtactatctctttaaaaagtactggctcaaaaaaataatagaaaataagaaacaaaaaacaggctgagaaaagtggctcacatctgttggccatgctggtttcaaactcctgacctcaagtgacctatgtgccttggcctcccgacgtgctgggattacaggtcggagccaccacacctggccccatcctcttaacataaacacttgaatgtcaataaaggcttgaactcaatgttaagtcaacacaaactcaagtcaatgctgaattgactccaatgtcaattaatgcttgatggtttgctatactcatttcattgggaacggttatctcaaaaatgaattttctgatgttctgcatggagtgatcttggactgaagaccttgccacactgatgacatttgtaagatttctgtccagtatagattctctgatgtctaatgacgtgtgaacgtgaagcaaaggctttgccacaatcatcacacttgtgaggtttctctcctgtataaattctcctatgttttgcataggatgaagcttgactgaagaccttggcacagtcatgacatttgtaaggtttctctccagtatgagttcaccgatgacctgcaatatgtgaacgatctctgaaaaatttgccacatttattacacttgtaagatctctcttcattatggattctccaatgatttgtaatcgttgtagcattactgaagactttgtgacaatcattacattagtcaagtttccctacaccatgaattgcctgatggtgaataagtgttgactgcttgccaaaggctttgccacactcattacacttgtaaggtttctctccagtgtgaagtccagtatgttgttccaggtgtgaatcactcccaagtcttgtcagaaaccttacatttgtaagctttctctccagtataaattctcctatgtctttaaggtgtgatttccaaatggaaactttgtcacatgcttcacatttctaaggtttctctccagtatgaattctatgatgacgtgaaaggtgtgattgttgattaaaagccttcccacattcattacacttgtaaggtttctctgcagtgtgaattctggtatgtcttgacaggagtgaattacgcacgaaagccttgtcacaaattgtacatttgtaagatttctctccagtatgaagtctacgatggtatataagggatgagcagtgacggaaggtattgccacactcattacacttgtaaggtttctcaccactatgaagtctacgatggcaatgaagggatgacctgcgactgaaggtcttgctgcactcattacacttgtaaggtttctcaccactatgaactctatgatggcatacaaggtatgacctgtgactgaaggtcttgctgcactcattacacttgtaaggtttctctccactatgaattctagtatgttttgccagataggaatgacacgcaaaagccttgtcacaaaccttacatttgtatggtttctctccagtatgacctatcttatgtgtctcaaggcttgatttacgactgaaaaccttttcacattcatcacatttgtaaggttgctccccagtatgaattgacttatgaattaaaagatctgaattttgaccaaaggtcttcccacattcattacacttgtaaggtttttctccacagtcaattctagtatgttttgccagttgtgaactccacacaaaagccttgtcacaaaccttacatttgtaagatttctctccaccatgaagtctatgatggcatacaagggatgacttgtgactgaaggtcttgccacactcattacatttataagttttctttgcagtatgaattcttctatgtcgagccagctgtgaatgccacgtgaaagctgtgtcacaaaccttacatctgtatggtttctctccagtatgaattctcttatgtgtctcaatggttgatttccgactgaaaactttgtcacattcttcacatttgtaaggtttctctccagtatgaattctatgatgtgaaagttgtgattgttgattaaaagccttgtcacattcattacacttgtaaggattttctccagtatcaattgccttatcaattagaagggctgaattttgaccaaagatcttgccacactcattacaattgtaacgttttactccagtatgaagtctacgatggcaggtaagggatgactcctgactgaaggtcttgccacactctttacacttgtaaggtttctcaacagtgtgacatctatcatggcatgcaaggtattgctcgtgattaaagagcttgccacatacatcacatttatattgtttgtctcctaaatggggtatctggtgtttccttaagagtgagctacaattaaaggctttgccactcttattacattggaaagatttttctctcatgtgtacttcctgtttttgtgggagtaatgaagaattcaggggattattcccatagttattagaaatctgggtttggggcctacaggaaattctttggaatgttgaaactgagggagcatcattagtagacttctcaagttgattaccaatttcacctttgatctgaaatatgtggagttcaggcagatgtgaataaaagcttgatccaagctgatctttaataggcttgtttccagcatgcctgtgatcatgttggtctgtgctaccagtcaacttttttatttttgtcatgggtgcttcaaggccatttctttcatcttcttgacactgaaactcaatgtcatgaatttctttctcaatttcctggaagcaaaaatctccaatgtgatgactttcatgtctttgcaatgtccctgtgtggatcacttctgtattgccttgccctgttgacaagacctccttcatcatgcatttggaagagatatctacaaaatataaacaccaatacatttccaattaagtacagatggtaaatcacactgaagtgcataaatatgacacaaaaaacgatacttattttgaacttcccaaacatcatcttcaaagtttaggaaaacgaaaggagcaatattctttagtaaataaagggtgattacatgtccttcaagacaattctatgaaagcctatttcctatgtcatgacaaaacactgacagggcacaaacatgtgtaagcctaaagtaaggagtatttttccactgtgaccctgaactgtatcacaatttgcaaaaagcatatcaccatcacatcggtgaagagaaaaatatatactcttcatatttaaagcatatttactctatacaaataaatgctaaaaaaaaaaaaaaaactccccacacaacatactatattggtaaataatccacaacaagctcatgtaaggataaccaaaagcaatggaaattccgtattgtcaaacaattatagcactgagaagataagaaaagattacaaaaattagccaggtatggtggcccatgcctgtagtcacagctattcaggaggctgaagcacaagaatcacttaaacctgggaggtagaggttgcagtgagccaggatcacaccactgcactccagcctgggtgacaaagtgagactctacctaaaaaaaaaaaaaaaaagttaatagaatatttttctgaataaatgtcataaaattacctataagaacaggcactttgtgacttttcaaaaattttttgtatttttatttttttgagatggagtcttgcactccagcttggagtgccatggtgccatctcagctcactgcagcctctgcctcctgggttgaagtgattctcctgcctcagcttccagagtagcttggactacaggcatgcaccactatgcctggctaatttttgtgtttttagtaaagatggggaccatattggccaggctggtctcaaactcctgacctcaagtaatccacccacctcggcctcccaaagttctgggattacaggtgtgagccactgcacctggtggcactttgtgacattaacgaatagtgcatgtcagttatattgcataccacataccgaaaagccatatgcaaaattataaaaattaattaataaaatattgtaacccaagataaaaccagcaagcaaataagtacatttatacagcctgcagaattctaaacaactccctcttaagaaaaaagccacaacttctactcaaccaccagcacacaatataagaactgaaatacatgttaagatcactaccttctgatgtatgaggccaagaaaatacacagcattaggccaggcgccttggctcaagcctgtaatcccaccactttgggaggccgagtcagacggatcacgaggtcaggagattgagaccatcctggctaacacagtgaaaccccgtctctactaaaaaaatacaaaaacattagctgggcatgatggctggtgcctgtagtccaagctactctggaagctgaggcaggagaatggcatgaacctggaagatggagactgcagtgagcccagatcgcgccactgcactctagcctgggtgacagagcgagactctgtctcaaaaatgaaataaaataaagaaaatacacagcatcttaagaaataagaattggctaatggctgggcacggtggctcacacgtgtaatcccagtactttggcaggccaaggcatgtggatcatgaggtcaggagttcaagaacagcctgaccaacatggggaaaccccatcctacgaagaatacaaaaaaatcagctgggcctggtggagggcgcctataatctcagctactttggaggctgaggcaaaagaatcatttgaactcaggaggtggagggtgcagtgagctgagatcgcaccattgcactccagcctgggtgacagggcaagactccgtctcaaaaaaaaataaacaaaggaagaaagaattgactaatagtatagaaaagtgtaattatgatgtcacaactacacttatgtaacagccaggcaatacagcaattttatatatatgcattccccatagttatctagttcactatgcataaaatataaaacatagaatgtgtactaggaaaatttattaactgagatcagagaaaacattgtataaaacaaattgcacaataagaacaaaaaatatgatgtatgttccctggcccgaatgttcgcattggctaaaagccactatcagatttcttattccccaataggatgttcctgcagttggggtcttttagagagttttgtaatgggtgttgactaattatgaatagcactagggcttttaattgtattttttctttctttttttctttctctctttactatttatttttatttatttattttttgagagggagtatcactgtgtagcccagcctggagtgcggtggtgcaatcttggctcactgcaacctctgcctcccgggttcaagcgattctcctgcctcagccttcagagtagctaggactacaggcatgcaccaccatgcccagataatttttatatttttagtagagaaggggtttcaccatgttggccaggatggtctcaatcttttgacctcatgatccgccctcctcgcctcccaaagtgctgggattacaggcgtgagccaccatgcccggactctttatttatttttgagacagaatttcgctcttgttgcccaggctggagtgcaatagcgtgatctaggatcaccacaaccaccgcctcgcaggttcaagcgattctcctgcctcagccacccgagtagctgggattacaggcatgtgccaccactcccggctaattttgtagttttagtagagatgtggtttctccatgttggtcaggctggtctcaaactcccggcctcatgtgatttggctgtctcagcctcccaaagtgctgggattgcaggcgtgagccaccatgcccggcaaagactagtgcttttataaaaagagacagtaaagagctcattgcctgctcctctttacaccacatcaggacacggcaggaagacggctgggctaaaccatgaagaaggctctcaccaggagccaatctagctgacatcttgttcttggatttcccactttccagattcatgagcaacaaatttctatgtcttaagctttccagtttcagctatttctttttttgtctgtttttgagactgagtaatgcttcatcacccaggctggagtgcagtggcacgattctcctacctaaagagattctcatgcctcagcctcttgagtagcagggagtacagacacatgccaccatgcctggctaattttttttttttttttttttgggaaacagaatctaactctgtcacccgggatggagtaagtggtgcaatcatggctcactgcaacatccaactccaaggttcaagtgattctcatgtctcagcctcacgagaagctgggattacaggttcataccaacacacccagctaacttttgtatttttactagagatggggtttcaccatgttggccaggctggtctagaacttctgacctcaagtgatccacccgtctcggcctcccaaaatattgggataataggtgtgagacatcatgcccgtccaatgttttttaatttagtaggttcaagttttcattatgtttgcccgactggtctcaaactcctgacctcaagccatctacccacctcagcctttcaaagtgctggaattagaggccaaagccactgcggctggccagtctaagctatttctaacaggacagtgaaaagagtgagacaggaaagggggcatctcatcatcaacattactgagggctgacaaatattattaaacaaaggaagttgagtgtgtactataaaacttatatgaagccatctaatagtactcatttgttttaaaaagcaggtggatgaatcactagtagaaactccatctctgctaaaaatacagaaattagccaggctcgcaccaggcataatcccagctacttgggggattatgtcctgaggcaggacaatcacttgaacccaagaagtggaggttgcagtgagccgagactgcaccactgcagtccagcctgggcaacaagagggaaactccatttaaaaaaaaaaaaaaaaaggccaggcacagtggctcatgcctgtaatcccagtactttcggaggctgaggcaggtagatcacttgaggtcaggagttcgagaccagcctggccaacatggtgaaacccccatctctactaaaaatacaaaacttgccaggcgtggtggcacttgcctgtaatcccagcttctcgggaggctgaggcaggagaaccatttgaatccgggaggtggaggttgcggtgaactcagattgtgccattgcacttcagcctgggaaacaggagcaaaactctttctcaaacaaaacaaaactaaacaaaaaacaaaaaaaaaaaccaaccctggaggcaaattaacattatttctcaaataatgacagcaggcccacagtgttcatgtacatgaccccagtttgcacgtacggtaagtgagggacaagacttgatcctgggcatgaaggatcccacgacatgttcttaggcacaatagtcagcgcaggcaggacaggaaatgaccagacacagaaaatatgaggagaacagaaagaagtacatcaagggggatacaaggactgagctgggacacaagcgctgagctgcgctgctgacagtggttctgaagccatccctcatggatcatgtgctgagtcatgatgtcctgcacacactgatttaagcggcctcctataattttgtccagtggatgaacaaggtcttcacttactcagggagagtagtgttggaggggaggggctcacggggaaattggggtgttcacttttacaaagtcaataggctggtatttgcatccagatcaatgtatcatgtgagtcaaggccaggaaaggaagggcaagggtggacggcaggaagtaatgggcatgtaggagtgaactttgtgcatgcacctctgtgggaatataattccaccaagatagaccaaatcttgagcttagaggaaagtggaactaatttagcaaatggtaacatattgacccaaggttaaatatgcaaattacaatatgggcaagggacaagaatgaaagagatccaacaatgcagcagtacggtggcctgaggtgaaagcagttttacatctcttaaattgaatgcctctgacttctagtttcaggcatgtactcaacaaaatcctctgtgtagattccagaaatgcatacaaacacacacacaaaaaaacaactaaactccatgaagagtacagtagagcaatgtaggagaccatgggggtgaacaaggatcccctggctgagtaggtagagatgtgtttgtgaaaacagagccaggctgagtgcagtggcttacttctgtaatcccagctcattaggaagacgggtgggtggatcatgttgtcaggagttcaagactagcctggccagcatgcatggtgaaacactgtctctactaaaaaaaaaaaaaaaaaaaaaaaaaaaaaaacattggccgggcatggtgatgcacatctatgaccccagctacttaggaggctgaggtagcagattgcttgaacccaggaggcagaggttgcagtaagctgagattgcaccactgcactccagcatgggtgacagagcaatactccgtctgaaaaaaaaaaaaagaaagaaactgtacctttaatagacatatggttttgccacattgtctaggctggtctcgaattcctgacctcaggtgattcacccacgcacttccaaagtgctgggattactggcatgtgcgacttcacccagctgacattatttattatagtaaagagaagaaaccaacccagatgtccattgacagataaatatacgaacaaaatgtggtacacacatacagtggaatattattcagccttaaaaacaaactcggaaggggccaggggctgtggctcatgcctgtaatcccagcactttgggaatccaaggcaactgaatcacgtcaggccaggctatcaaaatcagcctggccaacatggcaaaactgccatctgtaatagaactaccaaaaattagtcgggtgtggtgacacatgcctgtaatcccagccactcaagaggctgaggcaggagagtcgcttgaacccaaaaggaggaggttgcagtgagccaagatcatgccactgcactcaagcctgggcaacagagtgagactctgactcaaaacaaacaaacaaaaaaacaacaacatagaaatgaacaagttgaaagccactgtgtcttaaggaaatgacagtagaactaaacaatggaaacctcattcaacctcaaaagcttcctcaataagattgatgaaaaccatatctcttacagggttgatcctacaacaaactgaacataggttttcttgttaaaaatgaacagtgacacatattggtgtgaaaaatgtgacatgaacaagagttcagtcaagagcctcatacatatgaggctgtgagcccgaatgatgtcctcgctgggaggaattgcaacaccactgactgctgcttagagaagatgatcattagtttatgggatgaacattgtcacagtgccagtgagagacgcttctgtgatgctcctcaaaaaccagaatgagctgggcatggtggctcacgcctgtaatcccagcactttgggaggccgaggtgggtggatcacctgaggtcgggagttagagacgagcctgaccaacatggagaaaccccatctctactaaaaatacaaaattagctgggtgtggtctcgcatgcctataataacagctactcaggaggctgaggcaggagaatcacttgatcctgaggggcggaggttatggtgagccaagatcataccattgcactccagcctcggcaataggagcgaaacaccatctcaaaaacaaaaaacaaaaaacaaaacccatgtatggggcaaaatcacaaaagaggatacaaagccaggatgagccaagatagacaagagcagactcctcatgtctgcagggacattttcctcacccacagcctccaggttcctgtagttctccaacatcacttccctgtacaaagccctctgtgaagggttcaggcatttccactctgccaatgagaattctatagccacatcccggaaagtcaagcgtccctaaaatgaaacacacatttcaacaaaacattatggagtaatgagttatcaccttcacagaaaatgagaaatgagaaaataagtatttatttgatcaaagattatgttctgacaaaaggatgttaaggtatttttgaatattttttccctatagttgcgttttattgtagttttccttgaaagattttaagatcccataagtcactacggaaatctcgattttatggacaatataaaaactataaaaataaaaaggaaaaacagggccaggcatggcagttcacgcttgtaatcccaacacttcaggaggccaaggcgggcagattatttgcggtcaagagttcgagaccagcctggccaatgtggtgaaaaactgtctctcctaaaaatataaaaattagccgggcatggtagaaggcacctgtaatcccagctacacaggaggctgaggcaggagaatcacttgaacccgggagatggaggctgcagtgagccaagttcgcaccactgccctccatcctgggcaacagactgacactccatctcaaaaaacaaaacaaaacaaaacaaaaaaacaatgccgggcagtgactgtcacctgtaatcccagcactttgggagaccaagacgggcagataatgtggtcaagagattgagaccatcctggtcaacatggcaaaaccatgtctctactaaaaatacaaatattagctgggtgttgtggtgcaggcctgtactcccagatactcaagaggctgaggcaggaggatcgcttgaatccgggaggcggaggttgcagtgagccaagatcgcaccactgcactttagcctggcaacagagcaagactccatctcacacacacaaaaacaaaacaaaacaaaacaaaaaaacaaatacagggttttctctatagacatgccagatattatgttcaacataccgggtgatattaagtctctagatgagctaagatacatgtggtgcttcagagaggacaaagtccaatggctttcaaagaaaagtccaaatctaaaaactggcacagtggctcatgcctgtaatcccagcactttgggaggctgaggtgggcggatcacaaggtcaggagttcgagaccagcctgggaacatgctgaaaccccttctctactaaaagtacaaaaattagctgggcgtggtggtaggtgcctgtaatccccaatactggggaggctgaggctggagaattgcttgaaaccaggaggcagaggttgcagtgagctgataccatgccggatacaaaatctctctccttattattctccttttccagaattaaccacacatctgtgcacattaacatatgtatttcatatgtagtttctctgagctgacatccagatgtggcccgtgaacaacccaggctgcccagcagcactgacatcaacgggctcacaccccatgtttatccatgtcagggtgtgagcccttcccaggaccatgcccagtggagcctcttcccaagttcatgtcactgggtcacaggagatggaatctcagagcagctgagaggaactgagggcaggcatgggtgagtgcgagtgaacgtgtcagacaagatgcttcagactcagaaaagactggctgctacaatacctggcatttcagaaacgaaagacacagattaatccacagaggaatatcacttcacctgaggaagagccatgcctggctcctttcctttcctcttctgagctgcttcctcacgtaacatgagtctttaggaatcaatcctgtatgtgaaaaaaaatgagacttcatgttagaaatgactcactcccttcctgtgacaaaaacacacgaacgggggagacgtcaccctgtagaaagaagtcccccactgcccactgcaccagagatcatgcagagataaggaagtcccacaggaagacctatgagtgtatatttgaccccagtcttcagatctcacctctctcctggagaagccaccacacacgaggcagcagtggggagctgggctggactgatctccccttcagggcacagactcatccttcatcaattgccatccagaggacagcccctcacctctctgtggatcacaggctgaggtcagccctcagaaatgcaggactcagagcttccatgctcaatgctgcacacagatgacaagcacctgggccactgcaggtattactgagggtgggttccatcccgtcagaataagaatccctgctaaagtggcacaaaagctctatttgcaaaatgcctcgactctaacgtgaagccagggttgagctccactcagagggggcgagcccagcacagccccatgttctggctctgccctccccttggggccttgttctcaccaggatccagacagtggatgacaaaggcacaaaaataatcacacagaacaggcaatgtggagaaggggtagggtgagggttgggctgtgtgtaaggaaaataaatcttggggccccaaatcactaagcaaaagggaaaagtcaagctgggaactgcaagggaaccagactccccttctattcaaagtcatccctctgctccctgacacagatgcatatctgagtgcctccttcaaaagactaattagaaactcaaaagaaggacccagcacagtggctcaggactgtaatcccagcactgtgggaggccaaggcagtcagaccacttggggtgaagaggtagggactagcccagccaacatggtgaaaccacatctctactaaaaatacaaaactgatccgggcatctacttgggaagctgaggcaggagaatcacttgaacccaggaggcagaggttgcagtgagccgagattgtgccactgcactccagcctgggggacaaaacgagacttcatctcaaaaaaaaaaaaggaaactcaaaagactgcaaccatttgtgcctcagttctctgtgaactaaaagccccttccctgcttcaagtcttcctgcctttatttaaagttgtcccactttcccagaccaaaccaacgtacttcttacatatgttgatgtctcatgtctccataaaatgtataaaattaagctctgccccgactatcttgggcaaaataaactttctaaattaactcagatctgtgtaagattttctggttttacagtggcaatgtcaaatgggagatcacaaaggaaacccggagaagatgataccagaacaaggacctagaaaagaaaggctgcttgtcacttgcagctgaggggaagagagtcctaggcagagggacagctcaagtgaaggccctgagacaggagcaacctcagccccaggaataggaaagcagcctgtgtggctggaacagtggaagagaggagggcacaagtaggagatgaggagaaaaatgttcaaaatatacacaactgtgcacacacagcaataggtgtttaaaacactgaaaaagaggcagctgtagaaatgggatctgagcaaatgcttttctcatgaacacatgggctctgctaaaccaaggttccaagtcaatccagcccatccttcaacatctgtagagaatattatggaccagagggaattgagggagacacttacttagaagctcacagatcaccattttttcagatgatatgaggaaagaaaatggaataggctacttgaactaaattttcatgttagggtaaggaaaaaaggtccttgatatctttatcaagtacacactgaaacaacctaaaattatatatcacgtagtagaaaacgttttcgatatatgataaagactagaaagcacacagacctcaatgtaaactgaacacaatctcatagagaaacaattttaaaatggttaaaaaatatagatctaatgaaatcttgggtcaaaggagaaatatttgaaaatataccatactttgaaaacaatgaggccaggcatggtgacacgcctataatcccagcactttgggaggccagggcatgatcacaaggttaggagttcgagaccagcctggccaacatggagaaaccatgtctctactaaaaatacaaaaattagcaggaaatggttgtgcacacctgtcgccccagctactctggaggctgaggcaggagaatcccttaaccccaggagatgaaggttgcagtgagacgagatcatgccactgcacaccagcctgggtgacagagtctcaataaataaaaatatatatctaaacattagccaggcctggtggggcgtgcctgtggtcccagggaatccagaggctgaggtgggaaaatcacttgagcccaggaggttgccgctgcactgagctgtgatcctgccactgcactccagcctggacagcagtaagagtgtctcaaaaaaacagaaattaaaggcccggcagctgctcatgcctgtaatcccagcaccttgggaggctgaggtgggaggatcacctgaggtcaggaattcaagaccagcctgaccaagatggagaaaccccatctctactaaaaatacaaaattagccggccatggtggtgcgtgcctctaatcataactactcaggaggctgaggcaggagaatcacttgaactccagaggcgaactttgcagtgaaccaagatcatgccattgcactacagcctgggcaacaagagcaaaactcagtcaaaaaacaaacaaacaaacaaaaaacaaaaaacccgacaacaacaaaaataagtaaattaaaagtaaacttaaaaaatgaaaagcaactaatgaggcaaagcatggtggctcacacctgtaatcccagcactttgggaggccaaggcgggtggatcacggggtcatgagttcaagagcagtctggccaagatggtgaacctctgtctctgctaaaaataaaaagtcagacaggtgtggtggcagctgcctataatcccagctgcttgggaggctgaggcagagcattgcttgaacccgggaggtggaggttgcagtgagtcaagatcactccactgcactccagcttgcctgacagagaaagactccatctcaaaaagaaaaaataaatgaataaaaacacacaaaaaaaccaaccacatgaatgaaatgaagaggaactagaaaaaaggaaaccaattacaaaaagagaacaaaagcacttttaatactcctttcatcacgttccatatagtaacagagactcagtcacttcttaccctacttctctcccccactccccaccccagccatgaaaagggaagagggtgatccacaactaacgagtcaagtcactgtcctctggctgaagaggggttgcagagggaagctgcctctgatgccatcattataaaatgcaccacacttagacacaggagtttggcaactctcattctcatctgtataatttaaactaattttaaatttgttaccttataaacagagaaagcaacatgtcatcacttcatcatcacatccaatcaactcaccgctcatctgcacccagggtcccccttcatcttcattactgttccatcattctatacatagctctttctcaccttctctctccatctgtttcttttctgcatttccccctggacttctgctcattttatgcccctctcctgttttgcttcattcttttttgttttgttttgttttttagtatttattgatcattcttgggtgtttctcagagagggggatgtggcagggtcatacgacaatagtggagagaaggtcagcagataaacacgtgaatgaaggtctctggttttcctaggcagaggtccctgcggccttccgcagtgtttgtctccctgggtacttgagattagggagtggtgatgacttttaaggagcatgctgcctttaagcatctgtttaacaaagcacatcttgcaccgcccttaatccatttatttaaccctgagttgacacagcacgtttcagagagcacggggttgggggtagggttacacattaacagcatctcaaggcagaagaatttttcttagtacagaacaaaatagagtctcctatgtctacttctttctacacagacacagtaacaatctgatctctcttgcttttctccacatttcccccttttcttttcgacaaaaccgccatcgtcatcatggccagttctcaataagctgttgggtacacctgcagaaaggctgtcacttcacacttggaagattgcacagcggccaggcagaggcgccccccacctccccgacggggcggccgggcagaggcgctccccacttcccagatggggcggccgggcagaggcactcctcacttcccagaaggggcggttgctggacagaggcgctcctcacctcccagatggggcggccgggcagaggcgctcctcacctcccagatggggcggccgggcagaggcgctcctcacctcccagatggggcagccgggcagaggcgctcctcacttcccagacggggcagctgctgggcagaggcgctcctcacctcccagacggggcagccgggcagaggtgctcctcacatctcagacggggcggctgctgggcagaggcgctccccacctcccagatggcgtggccgggcagaggcactcctcacatcccagacggggtggccaggcagaggtgctccccacttccccgatggggtggcggctgggcagaggtgctcctcacttcccagatggggcggccgggcagagatgctcctcacttctcagatggggtggctgggcagaggcgttcctcacctcccagacagggtcgcagtcaggcagaggcgctcctcacatcccagacggggcggccgggcagaggcactcctcacttcccagacggggaggccaggcagcggtgctcctcacttcccagacggggcggccaggcagaggcgctcctcacttcccagacagggcagccgagcagaggggctcctcacttcctagacggggcggccaggaagagacgctcctcacttcccaaacggggtggtggctgggcagaggcgctcctcacttcctagatgggatggcggccgtgcagaggtgctcctcatttcccagactgggcagccgggcagagaggctcctcacatctcagacaatgggtggccaggcagagacgctcctcacttcctagatggggtggtggccgggcagaggctataatctcagcactttgggaggccaaggcaggcggctgggaggtggaggttgtagcaagccaagatcacgccactgcactctagcctgggcaacattgagcactgagtgagcaagactccgtctgcaatcccggcacctcgggaggccaaggcgggcaaatcactggaggtcaggggttggagaccagcccggccaacatggcgaaaccccgtctccaccaaaaatacaaaaaccagtcaggcttggtggcttgtgactgcaatcccaggcactcagcaggctgaggcaggagaatcaggcagggaggttgcagcgagcccagatcacggcagtactgtccagcctcggcaacagagggagaccgtggaaagtgagaggggaaagggagagagggagggagagggagaggcagaggcagagggagagggagagggaaagggagagggagagagagagggagagggagagcttttttttgttttttgagatggagtttcgctcttgttgcccacactgaagtgcaatgatgcgatctcagctcaccacaacctctgcctcctgggttcaagtgactctcctgcctcagcctcctaatccaaaattatcagggcacggtggcccatgcctgtaatcccagctactcagggggtagtatcgcaggagaatcgcttcaaccctaaaggcagagatactcattagccaagattgtgccattgcactccagcctgggcaacaagagcaaaactccactgcaaaataataataataataattagtatgtaggccaggtgcggtggctcatccctataatcccagtacattgcaaggccaagacaggaggaacctttgagcccaggattttcagtccagcctgggaaacatactgaaaccgtttctacaaaaaaaataaaataaaataaaaaataaataaataactagccgggcttggtgtctcacacctgtggtctcagctactcaggagactgagggaggaggatcacttgagcctaagaggtcgaggctgcagttagagtagataacgccattgtactccagcctgggcaatagggccagaccctgtctcaaaatattaattaattaattaattaattaaaagtattatgtaataacagaaagttgtttttttctttttccccacatcactgccccactttctaccccaccctgggaaaagggaagaaactgactcacaactgagtaagtcactgccctcgggctgaatagggattccaagtggaagctaacctctgacaccaagatttatagaatgtacatgactcacataggaattttaaaattctcaaactcatctgtataatttaaacaagttattagattatatacacagaagtcaacatgtcacaactaatcatatccaatgaactcacacactcatctgtatccaaagtcccccaccctttttttcttttaaaacagggtcttgctcttttcaccaggctggagtacagtggcatgatctctgctcacagcagcctggacctcctgggctcaagtgatcctccagcctctgcctacagagtagctgaaattacaggtgcacattatcatgcctggtttttgttttcgtttttttttttttttttttgatagagatgggggcaatgactattttgcccaggctggtcttgaactcctggattcaagcaatctctctgtcccagtctcctaaagtgctgggattacaggcatgagccactgcgcctggcccctctttcttcattactgtgcttccctccctaattctgtgcatatctctcattctccccttctctttctagctcttgttttcttttctttttccctgggattgtgctccttattttgtacctctctcctctcctgcaatttatccccttcttccctctattgcttctcttccacctcttctgctccatcctcacaacttatttaaccttttttttttttttttttttgagacggagtttccatcttgttgcccaggctggagtgcaatggtgcgatcttggctcactgcaacctccgcctcccaggttcaagcaattctccttcctcagacttcctagtagctggcattacaggcatgtgcaaccgtgcctgccttattttgtatttttagtagagacggggtttctccatgttggtcaggctgctctcaaactctggacctcaggtgatccgcccacctcagcctcccaaagtgctgggattataggcatgagccacagcgtctggtccttattgaagggggccagcccctccacacctgtgagtatttctcatcaggtgagatgagagactgagaaaagaaataagacagagacaacgtatagagaaagaacagtgggctcagaggaccagcactcagcatacggaggatccgcaccagccgaggtctctgagttccctcaatatttattgatcactatctctaccatctcagagagggggatgtggaaggactgtagggtaatggtggggagaaggtcagcaggaaatcatgtaagcaaagctctctgtgtcataaataagtttaaggaaagatgctgtacctcgatgtgcatgtagggtagatttatgtttgactttacacaaacatctcagtgcagtaaacagcagtattgccaccagcatgtctcacctacagccataaggcagttttctcctatctctgtaaacagaacatacgattgggttttacaccaagatattccattcccagggaggagcaggagacagaggccttcctcttatctcaactgcaaagagggctatctctttcactaaccgtcctcagcacagaccctttacgggtgtctggctgggggatggtcaggtctttcccttcccacgaggccatatctcaggctgtctcagtggagagaaaccttggacaatacccaggctttcttgggcagaggtccctgcggccttccacagtgtattctgtcccagggtactcgagactggagaatggcgatgacttttaccaagcatactgcctgcaaacacattttaacaaagcacagcctgcacagccctaaatccattaaaccttgggtcaacacagcacatgtttctgtgagcacagggttgcggctagggttacagattaacagcatctcaaagcagactaatttctcttagtacagaccaaaatggggtttcttatgtctacttctttctacatagacacagtaacagtctgatctctcttttttttccccaaaccttatttaacctcttgttgctccttctccccaatctttcaatcgtcctcaatctctatatattaccgcctcttctcttatctctccatctcctctgctctccctgttaaattctctcttccctgttacagcccccagtccccactctctagcaccccagatccccaggtgtcctccctgctgtggttctccctctggtctccgtgccaccagcaccactctgctctgtctgccctggctccaaatccctcctcctctccctcactctggtgagcctccctctttgctgcccctctccctatcttgtccttcatctctgtacatctagctcttctctacatttctccagttgcttttctcctcctgctttcttattttttctttcacttttgctgtctcttggcaaatttctcacccatcctctactttgccatctgttacgggcctttctcattcttcttttctctgtctctggttttctactgctctctcagtccctctctctatctcctcatctctttgacccaaacaatcacacgcgggtttggagtaagaggcctacatcctggagaagcgcattttccaggaggtggagctgggcaggcaagaacacccggtgtcataggacaaggccctgggacctccccaacgctggctcaggggaagcggtgactgcggagggaagacttggggagcagcagggcccggcacgaggagggacatagtgggagacggcgccttaagacatgggtggcacctgcaggctcccaggaccaggcagaggacccagcctccccaggactggggccccggcgctgcgctccaggggaggccgacgggggctgggaggcgcccagggcgggaatccagcgcacgggtgaggactttaaaaagcaaggggcaggatgagtcaacaaggttttgagcaggaaaactatgcgataggaagtgtatacattgccctatagcagaaagaccggggacgggaccagcctccaagcgacttcaaacccaaaaggaagcaacttccagactcttatgggcgtctcaatttgctctgggtgaaggaagacaggcaagaatttccaggtctgtgaggaccccacgtcccagggacagaagtgccagggacctgggaagtgcagacttaatacaaggcagagcaaaactcacgcgcctcggtaggacctttactccacgtgatccacttccgggtttgctgcgcaggacagaagccagtcccgggtggggcccccgaacatggtggcggggcctgggtgggacagaggcggggcgcgaggcggagagaccttgccctttagaacaggcaaagggcggggccgggaccggacctgtgcatctctccgcctcgcacccagcgcctctgtttttcgggtgtttggaggtgagagcggccaggaaggctgaggcatgatacaaaagccctggaattatctggaacgggaatgcaaactagaatgtgaaatgcaaagccctgcctgggcggaacatacgatttcatgctgatggcccacagaacagaacagaactcctctccctttctattctccattcactcaggagggagagtccaccctgtgctcagcttcagagacttccctagagcctttgcttgggatgcgggactgggtgctcaggccagggaggagtgaggtcaccacctgctgcctaaacgcagcagggatgcgggcgtgaggccggaagcctgaggtcccagctactcaggaagcagcggcgggagaatcgctgaacctgggggtccaggccagcctgggcgacaaagtaacaccccctcccgcagtgctctcttcattgtctctctcgcgcgctctttttcttttctttcctttttatttatttttattttttgagacggagtcttgctctgtcacccaggctggagtgcagtggcatgattttggctcactgcaagctccacctcccgggttcacgccattctcctgcctgagagttgagtaactgggactacaggtgcccgccacgatgcccggctacttttttgtatttttagtagagaaggggtttcactgtgttagccaggatggtctcgatctcctgaccccgtgatccacctgcctcagcctcgcaaagtgctgggattacaggtgtgagccaccatgctcggccttgtgtttttttttttttttttctttttaaacaaaatttttcatggtgtgacacagggatccaacattattcttttcaatgtggatatccagttagttgtcccgcacgtttgtgaaagagatcaattactttctctttttttacttttttctttccttttacttttgagacagagtatttctctgtggcccgtgctggggtgcagttgtgagatcatggcccactgcagcctctgcctcctgggttgaagctattcgtctgcctcagcctttggagtagctggtattacaagcgcacatgaccatgcccagctaacttttgtatttttggtagagatggggtttcaccatgttggccaggctggtctagaactcctgacttcaagtgatccgcctgccttggcctcccaaagtgctgggattacactcgtgagtcactgtgcctggcccaggaaatattctttacttcactttttaaatgtgagaaaatataattgagaaacaaagagtcttgccccaaatgagaaatcatctccacgatgataatagagaaagaaagaataactattttattaataaataagctttagaccagaatgtgatgggaaataaaggcaaacagctaagaggttgaaaagagagaaagaaacgtcactgttactatacaacccatttagtacatgttttcaagataaacactaatcagtcctcagggaagaggacttgaaaagcccttggtcacacatagttcatcctggctctacttggtaatggaggtgaccatctctgtcagctaactagcttcatcccgaggcagggggagaaaccctaacactaaccctaacacaaaaattagctggacgtggtggcaggcgcctgtaatttttctgtatttttagtagagacagagtttcaccaagctggccaggctggtttcgaactcctgacctcaagtgatctgcccaccttggcatatcaatgtattgggattacaggcttgagccaccagggtcagccaggaaaaactcttagaagttgcacctgcattccgctagactctgcttgcatgaccacattcctctcaaggctcagaattatttacaggtccatagctttaaatttgaatcatttgatgtttgaattatttaatttcctactgagacacaggtactatctatcttgttgtgtgccttttttttttttttttttttgagacggagtctcgctttgttgcccaggctgcagtgcagtggtgcaatctcagctcactgcaacctctgcctcccaggttcaagcaattctgcctcagcctcctgagtagctgggactacaagcatgtgccaccacacccggctaatttttttgaatttttagtagagacaggttttcaccatgttggtcaggtggtcttgaactcctgacctcgggattggccaggcttggcctcccaaagtggtgggattacaggcgtgagccactgcacctggccgttgtttgcctgtcaaagtgagctcccaagttcttcagaaatacatccctgggccgggcgtggtgggtcacgcctgtaatcccaggactctggaaggccgaggctggaggatcatctgaaatcagaagttcaagaccagcctggccaacatggtgaaaccccatctctacaaaactataaaaatcagccaggcattacagcgggtgcctgtagtcccagctacttgggaggctgaggcaggagaatcacatgtacccgagagacagaaattgcagtgagccgagatcgcaccatttaactccagcctgggcaacaagagtgaaactccatgtccgagaaagaaaagaaaagagaaagaaagaatactaccctcagaaaacagaaaatgcatttgcaaattttctaaataaatctcctaagaaaagaaatgaaaggaaagaaaatctctttctttattttcaaaggaggaattaaacctctcatttacttccttgtctgtttgagatagggtgtagctcactcacccaagctggagtgtggtggcaaaaacagggctcactgcagccttcaactccctggctcaagtgatcctcccacctttttcatcaagcatttggaagagatatctacaaaatataaacaccaatacgtttccaattaagtccagacggtaaatcatactgaaatgtgtaaatatgacacaataaacaatacttactttaaacttcccaaacataatcttcaaagtttaggaacataaaaggagtaagattctttaataaataaagggagattacatgtccttcaaatcatttctatggaagcctatttccaataccatgacaaaacactgacagggcaccaacatgtgtaagcctaaagtaaggactgtttttccactgtgaccctaaagtgcatcacagtttgcaaaaaacatatcactgtcacattaatgaaaagtatatattcttcatatttacagaatatcttctgtatacaaataaatgctaaaggaccacaaaatatactatactggtaaataatccacaacaagctcatgtaagggtaaccaaaatcaatggaaatgctgtattgtcaaataatcatagcacaaagaagataagaaaagattacaaaattagccaggcatggtggcttgcgcctgcagtcccagctactcaggagactgaggcacaaggatcgcttgaacctgggagggaaaggttgcagggagccaagattgcgccactgcattccagcctgggtgacagagcgagactccatctcaaaaaaaaaaaaaaaaaaaaaaaaaagaaaagaaagaaaaagaaaacaatgttaatacaatatttttctgaatacctgtcataaaattacctataaccacacagaacaggcacttattgaaattaacaagtgcagtgtatcagttatattacatatcacatactgaaaagccatatgtgaaatcttaaatattagtcagtaaactattgtaacccatgataaaaccagcaagcaaataagtacatttatataggctgcagaattctaaacaattccctcttaagaaaaaagccacaacttttgcttatcaccagcacacaatataagaattgaaatacgtgttaagatcactatcttctgatgtatgagttcaagtaaatacacagcattataaggaataagaactgactaaccatgtcggagggtgcaattatgatgtcacaggtacagctgcatatcaccaggcaatacagcaattttgtatatatgcattgtccttcgttatctagtcaactgtgcaaaaaatatagaaagtgtactgggaaaatttatcaactgagatcacagaaaacattgtataaaacaaattgcacaataaaaccataaaaaacatgatgtaggccgggcgcggtggctcaagcctgtaatcccagcactttgggattccgaggcgggcggatgacgaggtcaggagatcgagaccatcctggctaacatggtgaaaccccatctctactaaaaatacaaaaattagccgggcatagtggcgggtgcctgtagtctcagctactcgggaggctgaggcaggagaatggcatgaacccgggaggtggaggttgcagtgagccgagattgcatcactgcactccagcctgggcgacagagccagactccgtctcaaaaaaaaaaaaaaaaaaaaaaaaaaaaaaaaacatgatgtaggctccttggtctgaaagattatattggccaaaagcgatgttcagagttgtgtccaataggatgttcctgcagatggggcctgtgagagaatttggtcatgggtgttgactacacatgaataggtctagtgcttttatttttattatttatttatttgtttactttttgagacggagtttccctcttgttgcccaggctggagtgcaatgtcacgatcttggctcaccgcaaactttgcctcctgggttcaagcaattctcctgcctcagcctcctgagtagctgggattacaggcatgcaccatcacacccagctaattttgtatttttagtagagacggggtttctctattttggtcaggctggtctcgaaccacctacctcaggtgattcacccgcatcagccttccaaagtgctgggattacaagtgtgagcccccgcacacagccaagactactgcttttataaagagagacattaaagagctgattgttatttctttttgtttgtttgttttttgagaccaagtcacgctctatcactcaggctggagtgtagtggcatgattctcctgcctcagcctcccaagtagatgggactacagatgcatgccaccacccctggctatttttttttgggggtgggggagacagagtctcactctgtcacccaggctggagtgccgtggtgcgatcgtggctcactgcaacctctgcctcccagctgggtccaaataattctcctgcctcagcctccagagtagctgaaattagaggcgtgtgccaccacgctcagctaatttttgtatttttggtagatacagggtttcatcatgtaggccaggctggtctcaaactcctgaccttaagtgatttgctcccaaagtgctaggattacaggcatgagccaccacgcctggctttgatgttcctttctttttctttatttttttttcagacggactctagctctgttgcccaggctggcatgcagtggcgcaatctcggctcactgcaacgtctgcctcccgggttcaaacaaacctctgcctcctgagtaggtgggattacaggagtctgccatcactaccggctaatttttgtatttttttttttgtagagatggggtttcactctgttggccaggctggtatcgaactcctgacctcgtgatccacccaccttggcttcccaaagtgctgggattacaggcttgagccaccgtgccctgatgtcccttttgaaaactactatgggctaggcgtggtggcttacgcccgtaatcccagcactttgggaggccgaggcaggtggatcacctcaggtcgggagttagagaccagcctggatcaacatgaagaaaccctgtctctactaaaaacacaaaattagccgagcgtggtggtgcatgcctgtaatcccagctattcaggaggctgaggcagtagaatcgcttgatgctaggaagccaaggttgtggtgagctgagatcatgccatcgcactccagccttggcaacaagagcaaaattccctctcaaaaaaagaaaaaaaaatggccgggcgggtggctcacgcctgtaatcccagcactttgggaggctgaggcgggcggatcacgaggtcaggagattgagaccatcctggctaacacggtgaaatcctgtctctactaataatacaaaaaattagctggtagtggtgacaggagcctgtactcccagctactccggaggctgaggcaggagaatggcgtgaacccgggaggcggagcttgcagtgagctgagatcgtgccactgcactccagcctgggtgacagagcaaaactccatctcaaaaaagaaaaaagaaaacagaataactcacagtattgagttattctgaataactcacagtattgagttattctgaataactcacagtattgagttattctgaataactcacagtattgagttattctgaataactcacagtattgagttattctgaataactcacagtattgagttattcagaataactcacagtattgagttattcagaataactcacagtattgagttattcagaataactcacagtattgagttattcagaataactcacagtattgagttattcagaataactcacagtattgagttattctgaataactcacagtattgagttattgagttattcagaataactcaatgtattgagggctaagtaggccagacacggtggctcctccctgtaatcccacccgtaatcccagtaatttgggaggccaaggcaggaggatcctttgagcccaggattttgagaccagcctaggaaacatagtgaaactccgtttctacaaaaaaaaaaaaaaatacaaaaactagccgggcttggtggctcatgcctctggtctcagctactcagaaggctgaggaaggaggatggcttgaacttaagaggtcgaggctgcagttagaggagatcacgccactgcacaccagcctgggtgatagagtcagaccctgtctcaaaatattaattaattaattaattaaatgtattttgtaacaacagacagtgactattttcccacttcactgacccacgtcctaccccatcctaggaaaaggggagacagtgattcacaactgaataagtgactgccctctggcaaatagggattccaagtggaacataacctctgatgccaagatttatagaatgtacatgtcttatagatacgaattttaaaattctcaatctcatctgtgtaatttaaacaagtttttagttattagattatatatacagaactcaacatgtcacaaccaatcatatccaatgaactcacccactcatctgaacccagtctctcgcccctttttttttgtttggagacaaggtctcgctctgacgaccaggctgcagtgtagtcacatgatctcagctcactgcagcctggacctcctgggctcaagtcatcctcccagcttggccaccagagcagctgggagtacaggtgcacaccattatgcccggttatttacttacttttttggcgggggggaggtctcactatgttgcccaagctggtctcgaactcctggactcaagcaatccccttgcctcagtctcctaaagtgtggagactacagactacaggcgtgagccactgtgtccagaccctctttcttcattactgtgcttccctccctaattctgtacatatctctcattctccccttctctctctagctcttgttttcttttctttttccctgggattctgctcttcattttgtacccctctcctctcctgctattcatccccttcttccctttattccttctcttccacctcttctcctccatcctcacaacttatttaacctcttattgctccttctccccaatctttcaatcgtcctcaatctccatctatttctgcctcttctcccatctctgcgcctcctctgctctccctgttaaattccatcttccccgatatactcccttgtccccactctgtgtctccccagatcccagctgtcctctctgctgtggttctccctctgttctccttgacacaagcaccactctgctctgtctgccctggctccaaatccttccctctctccctcactctgatgagtctccctctttgctgccactccccctaccttgtgatccttcatctctctgtacatctatctagcctttctctacatttctccggttgcttttctcctcctgctttcttaggtttttttttttttttttcacttctgccatctcttggcatatccctcaccaatcctctattttgccatctgttatgggcctttcttattcttcttttctctgcctcaggttttctactgctctctgtctcctgattcctttggcccacacaatcgcaacacggtttggagtaagacgcctgcatcccggaggagcgcattttccacgccctggagctccgcaggcaagaataccccgtgccgcaggacaggcccctgggacctccccagtgcaggttcaatgaaagcggtgactgcggaggggagacctggggagcagcaggccccggcatgaggaggaaggtgcggggcggggggggggggcgcgacggcgccttaggaccaggatggggtctgcaggatcccaggacctggcagaggactcggcctccccgggactggggctgcggcgcggcgctcccggggctgaggagggggaggctgggaggcgccctgggcaagaatccacatcgcgggtgaagactttaaaaagcgcggggcgcgaggagtcagaacaaggttttcagcaggaaaactacgcaacagaaagtgtatacattgacctatagcagaaagaccggggacgagaccagcctcaggacgactttaaacccaaaaggaagcgaccctcgggctctcacggggatgtctcaatttgctctgggcaaaggaagacgccggagaatttccaggtctgtggggaccccacgtcccagggacagaagccctgggaacctagttagcgcagacttaatacaacacagagcaaaactcaccgcggcgatatgacctacactccacccgatccgcttccgggtttgcgttaatctgcgcgcgcaggacaaaagccaggcctgggcgggaagtgggaggtaggcggggcctgggcgaggtaggggcggggcgcgaggcggagagaccttgccttttagaaccggcagagggcagggccggggcgggatctgcgcgtctctcagcctcgctcccagcgtctctgttttcaggttttggaggcgagagcgccagaaagtctgaggcatgatacaaaagccctgttgagagaagagagagaccctctgacattgttttatattgttttatagtcagtaaaaacaacaggaagtaaaaccaaagacaggcagccccgcgccaggcccgaaaccaggcctggatccgcctggcctaaacccagtagttaaaaatcaacttatgatttagaagctgatgttaggcatagattccagacattgtatagaagaacacggtgaaactcctgccctgttctctctctccctgatcaccggtgcatgcagcccctgtcacgtatcccttgcttgctcaatcagtcactatcctttcatctgaaatctttagtgttgtgagcccttaaaagggacagaaattgtgcactcggggagcttggattttaaggcagtagcttgccaatgctcccagctgaataaagcccttccttctacaactcggtgtctgagaggttttgtctgcgactcgtcctgctacactgtaattgtctggaacagggatacaaactagaatgtgaaatgcaaagccctgcctgggcggtatgtaccatgtcatgctgaggtcccacagaacagatagatatcctctccctttctattgtccattcactccggaaggagactccgccctgtgctcagcttcagagacttccctgaagccaccgcctggaatgccggacggagtgctcaggccgagaaggagtgaggtcaccacctgctgcttaaagacagcagaggcgcgggggcgggagcctgaggtcccagctactcaggaagcagcggcgggaggatccctgagcctcgggttccaagccagcctgagcgacaaaataacgcccactgccgcggtctccctttcttgtctctctctctctctttttttttaaaaaaaactttcgcaaataaaatttttgattgtgtgacatagggatccaacattattcttttccatgtggatatccagatagttgtcctagcacatttatggaagagatctattactttcttgtattattattattattattattattattattattatttttgagacagagtatttctctgttgcccaggctggagtgcagtggcgagatctcgactaaatgcatcctctgcctcctgggttcaagcgattctcctgccccagccttgggaacagctggcattacaggcgtgcgccaccatgccaggctaatttttgtatttttagtagagacggggttgaccatgttgaccaggccggtatcggactcctcactccaagttatttgcctgcctcagcctcctaaagtgctggggttacggcgtgagccaacatgcctggctaattttttgtatttttagtagagatgggatttcatcgagttagccaggacggtctctatctcctgaccttgtgatccgcccgcgtcggcctcccaaagtgctgggattacaggcgtgagccaccgcgcccggccagaaatattctttttttttttttttttttttttaaacggagtctcactctgtcgcccaggctggagtgcagtggcgcaatctcgactcactgcaagctccgcctcccgggttcacgccattctcctgcctcagcctccggagtagctgggaccacaggctcccgctaccacgcctggctaatttttttgggtttttttttttttgtatttttttttagtagagacggtgtttcaccatgttggccaggatggtctcgatctctagacctcgtgatccacccgcctccgcctcccaaactgctgagattacaggcgtgagccaccgtgccatgccgcagaaatattctttgcttcgctttttaaatgttgacaaaatataactgaaaactaaaaagtctcctcccaaatgagaaatcatctccacgacgataacagagaaagaaataaaaaccattttattaataaataaaccttagaccagaatgtgatgggaaatagaggcaaacagctaaaagattgaaaagagagaaagaaacttcactgttctatacaacccattaaggacatattttcaagataaatactaatcagtcctcaaggaagaggacttgacaacacccttggtcacacatagttcatcctggctctacttggtaatggaggtgaccatctgtgtcagctaactagcgtcatcctgagggagggggagaaactctaacccatgtctttttggcaagtgtgagttttacaacatggcgacaggtgccctctctggtgaggctcctaccatacgacagacactgatgtcagcagtaaataataaaatttaaagtatatgattaagtacagagttaatgtgaacacagagcttgaagaaagccacctggaaacatcaactccaaatgaatgggatcagcgttcccaagtagagacgttaaggtttcacacacagggaaagacagagaagctttagcagaatcaccacactttccattcaagaccagtgcacaggctgcagcaacttgactggtgatgatttgatacacttcaaggaaagttactttatcattacataagaagggacaatgctctgaggaggtcttatcactggggctctgtagtcttcctaatttttttattgttattgttatttatttatttattttgagatggagtctcgctctgtcaccaggctggagtgcagtggtgcaatctcggctcactgcaacctccgactccctggttcaagtaattctcgtggctcagcctcccgaatagatggtactacaggcaagcaccaacatgcccagctgatttttgtattttttttagggatgagatttcaccatgttggccagtataatctctatctcttgacctcgtgatctgccagaatcagtctcccaaagtgctgggatgacaggcgtgacccactgttcacggccagttttccaaattatttacagaaaaactcctagaagttgcgcctgcattcctctgaactcaggttgcatgaccacattcctctcaaggctcagaattatttaaaggtccatggctttaaattggaatcacttgatatttgaattacttaatttcctactgagacacaagtgctatctctgttgtttgcctttcagacagagctcccaagtccttcggaaatacattcctgggtcattaagctaaaaagcggtttagttagtttctaaaaaaattccatttctgtccgagcgcggtggctcacgcctgtaatcccagcactttgggaggcagaggcgggcggatcgcctgaggtcgtagtttgaggccagcctgaccaacatggaaaaaacccttctctattaaaaatacgaaattaactgggcatggtggcacatgcctgcaatcccagctactcgggaagctgaggcaggagaatctcttgaacctgggagacagaggatgccgcgagcggagatcacgccattccactccagcgtgggctacaagagcgaaactccatctcaaaaaaaaaaaaatactgtttcagaagacagagaaaattcatttacacattttctaaataaatgtcctaagaaaagagtctacaggaaagaaaatctcttactttattttcgaaggaggaattatgcctctcacttatttgcttgtttgtttgagacagggtccagctctgtcatccaggttagagtgtgctagtgagatcagggatcagtgcagcgtccaactccctggctcaagtgatgtttcaatctcagtgcccaaagcagccgagaacacaggtgtgcaccaccacacctggctgagtttttttatttttagtagagacgaggtctcactatgttgctcaggctgatcacacactcctgggctcaagcaatcctccggcattggcctctcaaagtgctgggatgacaggtgtgacccaccgctcggagttctggctttatttccatgaaataagaaattttcttccaccttctgtgtataataggcagttctatatgtcacctttctactttcattatccgctcaaacaacccaggaccttgcttggtttactaagccattcaaattatcagtccccgttgtaagcagcgccccactccacccctttaccgaggtacctgcccctgtaccccaacctgtcccagcctgaggggagcttgccccgcctgcaggacgcgcgactccacctgctcaaaaaaggcactttgccttaaaaccattttcaacttgggagaaaaaacgattcagcattcagtacaaaatggcccactaccaaatgttattttaccttcgattgtttgaaatgttaactgaaaacgggcaggaagcctccctgtgatattaggggtaatatgacggcacatcagaaacaatccaccaatcagaacccgggggatcgagtgctggagatcaagaggatgacagcaggccacatcatggacccagctgaggagagagccccgacgcatcgctgccaggccccgcccttaagaacaacaccccatttcaggccccgcctccaagaccagggtaaacctccggccccccagcaccgacccgctgtccagcctggcctccagcctcctccctcttgactcaccccaggccccgcccccaccttctaaccaggccccgcccccaaattgtggagtcaaatgcattagtaaatcagatacaaaatatctccccttattggtctctttttcagaatttaccggttatctgtgcacattaacatatatatttcacatgttatttctctgatctggtccacaaagagctgacatccagatgtggcccctgaaccatccaggctgcccagcagcactgacaccatggtgcccacaccccgtgtccatccatgtctgggtgtgagcccctcccaggaccatgcccagtggagcttcttaagaagttcttgtcactgggtcacaggagatggaatctcagagcagctgagaggaactgagggcaggcatgggtgagtgtgagtgaatgtgtcaggcaaaatgcttcagactcggaaaagactggctgctacaatacctggcatttcagaaaagaaagacacagattaatccacagaggaatatcacttcacctgaggaagagccagccctggctcctttcctttcctcttctgagctgcttcctcatgtaacattagtctttagaaatcaatcccgaatgtgaaaaatgaaaggggcctgccactccacacctgtggatatttctcgtcaggtggagacgagagactgagaaaacaaataagacacaaagacaaagtatagagaaagaacagtgggcccaaaggacaggcacactcagcatgcgaagacccgcaccagcgctggtctctgagttccctcagtatttattgatgactatttttactatcttggcaaggggagtgcagcagggcaacagggtgatggtggggagaaggtcagcagggaaacgtgagcaaaggaatctgtatcgtgaataagcttaaggaaatgtactgtgcctggattgtagggaaaagaaagagagatcagattgatactgtgtctatgtagaaaagggaactcgattttgatctgtactaagaaaaattgtttctgctttgagatgctgttaacctgtaactttagccccaaccctgtgctcacagaaacatgtgctgtattgaatcaaggtttaatggatttagggctgtgcaggatgtgccttgatttgttttgtttttcggaggtggagtctcattttgtcgtgctggctgcagtgcagtggcatgatctcggctcactgccacctctgccacctgggtcaagcgattctcctgcctcagcctcccgagtagccgggattacaggcaccggccactacgcccggctaatttttgtatttttagtagagacgggttttcaacatgttggtcaggctggtctcgaactcctgacccgcctcggcttcccaaagtgctgggattacaggcgtgagccaccatgcccggccaggatgtgccttgttaaccatgtttgcaggcagtatgcttggtaaaagtcatcgccattcgccattctcaattaaccagggagaaaatgcactgtggaaagccgcagggacctctgcccaagaaaccctgggttttgtccaaggtttacccccactgagacagcctgagatatggcctcatgggataggaaaggccttaccatctgccagcccacccataaagggtctgtgctgaggaggagtagtgaaagagggaggcctctttgcagttgagataagaggaaggcttctgtctcctgctcatccctgggaatggaatgtctcagtatagagctgaccattcccattcgttctattctgagataggagaaaaccgccctgtgggcgggggcgagatatgcgggcagcaataccgctctgttactctttcccacacggagatgtttgggtgaagagaaacataaatctagcctatgtgaacattggggcacagttcctttccttgaacttattcatgatacagattcctttgttcacatgtttccctgctgaccttctccccacctgttgccctgctacactcccctcactaagatagtaaaaataatgatcaataaacactgaggaaactcagagactgtgcgggtcctccgtatgctgagcgctggtcccctgggcccactgtactttccctatactttgtctctgtgtcttatttcttttctctgtctctcgtcccacctgatgagaaatactcacaggtgtggaggggctggcgcccttcactggatgtgcacgtaggccagatttatgtttcactttacacaaacatctcagcgtagcaaagagtcacagagcagtattgctgccagcatatctcacctccagccacagggcagttttctcctatctcagaatacaaagaatggtcagctttacacctagacattccattcccaggacgagcaggagacagatgccttcctcttatctcaattgaaaagaggcctccctctttcactaatcctcctcagcacagacccttcactggtgttgggctgggggatataaggtctttcctttcccacaagaccatatctcaggctgtctcagtgggtggaaaccttggacaatacccaggcttacttgggcagaggtccctgtggctttccgcagtgcattgtgtccctggttaatagagaatggagaatggcatgacttttacaaagcatactgcatgcaaaaatactgttaacaaggcacagcccacacagccctaaatccattaaaccttgattcaatacagcacatgtttccgtgagcacagggttggggctaaatttacagatttatagtatctcaaagcagaacagttttgcttcatacagatcaaaatggagtttcttatgtcttccttttctatatagacacagtaacaatctgatctctctttcttctccccacaaaaaaaaatatgagacttcatgttagaaatgactcattcccttcctggggcaaaaacccacagacaggagagatttcacccgtagaaagatggtcgtctgcttcccactgcaccagagatcatgcagagataagaaagtcccacaggaagacctacaagtgtatatttgacccaggtcttcagatctcactcccctcctagaaaacacccacatacgaggtaacgggggggcgggggggagctgggctggattgatctcccctcggcacagactcgtccctcatccctcatcaatccccatctggaggacagcccctcactctctgtggatcacaggctgagctcagcactcagaaatggaggacacagagcttccatgctcaatgctgcacacagatgacaagcacctgcgccactgcaggtattactgagggtgggttccaacccatcagaataagaatccctgctaaagcaacacaaaagctctatttgcaaaatgctctgcactctaatgtgaagccagggttgagctccactcagatggggcgagcccagcacagccccaagttcttgctccgccctccccttggggccttgtgctcactaggatccagagagtggatgacaaaggcacaaaagtaatcacacagaacaggcaagatagaccagaggtggtgtgagggttgggctgtgtgaaaggaaaataaatttggggaccccaaatcactaagcaaaagggaaaagtcaagctaggtactgcttagaaaaccagactcaccttctattcaaagtcaccactctgctccctgacatacatgcttatctgagtgcctcctttggcaacgctaatcagaaactcaaaagaaggacccagcacagtgcctcaggactgtaatcccagcactttgggaggccaaggcaggcagatcacttggggtgaagggttcaagactagcccggccaacatggtgaaacatctctactaaaaatacaaaagttatctgagcatggtggcatgcacctgtagtcccagctacttgggaagctgaggcaggagaatcacctgaatgcaggaggcagaggttggagtgagtcaagatcctgccattgcactccagcctgggccacagagcaagacttcatctcaaaagaaaaaaagaacctcaaaagatcgcaaccatttgtgcctcacttatctgtgacctggaagccccctccctgcttcaagttcaagtctccctggctttgtttaaagttgtcctgcctttccagaccaaaccaacgtacttgttactatattgactggtgtctccctaaagtgtataaaattaagctgtgccccgtccacctggggcacatgtcatcaggaattcctgaggctgtgccacgggtgtgtcctcaaccttggtgaaataaactttctaaattaactgagatctgtctgagaagtcctgggctcacagctgcaatgtcaaatgcggatctgtgtgagatcacaaaggtttccacacagaaggtgataccagaacaaacacctagggaagaaatgatgcttgtcacttgcagctgaggggacagagagtcctaggcagagggacagctcaagcaaaggccctgagacaggagcaatctcagccccaggaagaggaaagtggcccgtgtgggtggagcagtggaagaaaggagggcacagatagatgaggtcagagaggtcctgggggcacagatccatagggacaaggtcttcaaacatttttctcccacaacccaaaagaatattgaaaaccaactctgatcccagctattcgagaggctgaggcaggagaatcgcttgaacccgggaggtggaggttgcagtgagccgagatcgcaccactgcactccagcctgggccacagggcgagagtcagtctcaaaaacaaacaaacaaacaaacaaacaaactgagcactaacctctcgagaagaaaagccacacactgtattttgccagtcatttcaggggtcactgtcactgtgactgagcttttccagtcttattcctcacctctatgttaaggggggctcactgaggctcacaacgggagacatttcaccaagttatcctgagaagctctgaggtgagtagaaaataggtgtggctgactcccacgagatggcctggaagggccaataggctgccttggtcttcctcctctggaaaattgcaagatcagacgggagtcgtggcccagctgggtaatcccagcactttgggaagttgaggcaggcaggtcatttgagcccagaagtttgagaccaacatgggcaacaagggagtctggtttaataactatatttcctacaactagcatataagggggctttacacaactttgcaaaggaactgttagactggaatttaggtcgatagtataaaatggcttacgatctcttgtttctatagcttgatttccagaccaaattttaatgcggtatgaggccacagtaagactctataattttggatgttcaggaccagaaacagaacttattatctttgttcttggagtagagatttttttttctccccattcccaagggtagaaagacggcaattttttgtgcttatgtttggctaaactttttgttaagtcactgttaacagctggactcacttctgcactgggacatgactgagtttgtcctgtgcaattgtggtagaattgacctcgaggtgcccaatctataatagttccgaatttatcattttgtaatatcaccgcactattggccacacattcttcccaaactaaaacttttgtgtcttttgatcctttgggattttttgggggtaaggctttcctttaggcctaaattttaatgatctttgataagaaaagtcttgtaaataatttacctgtggcctgagtgacattccacttaccgcgtgattagtgaatctactggtggtaccgacagtaggtacttctaccaaccaatttttgactgcaggcattaaacatcctggtgctctcccgaggcaaataggaggataatgatacccagtggaaatatttatcatcattccttcttcctcaggtttggcagggcaacgatcatctgtggggccaggtacccatacactattattaacgtatacttcaataggattatccatccatgagactgcccgaattaagggcgggaaaggcacataggcccagtaggtataattagctgcagctgctcctgcaggcgtggggagacttaccaccgttgatacaatcatcaaagctgcaagcagcgtgttctctggagtttgtgtcacctttgtgttctctaggcttttttaagctaactgtgtcagcttttaaattgtgcccaagttggcagctccgccttcgtggtggatggcaacttcatctgtttttttgacatcaccattttgtttatcttgtgagtcaatggtgctcgattgcggtgtttccgtctctgtggaggcgcttttttttttgtttgtttgcatctctaatgggttcattgtagaactttaaatgtctagtgggtatctaaacaggaagctgattttctcctggtgaaacacaagcaaaacctctcccccacgttaccaccttccctatttctcatgtcttattgttgttgtctttttatcaaatcagttttccttcacgtaggctgttctttttaccagtaagatgttgttttgcagaggtagtagtctgatttctataagtgtttaaaacatttaaagtatagagtgctagattaagttgcatctgaggagtggtacactccttactgtctcccccttctctttaactgagttttgagtgttctattagtttttttaactatggcctgtccttgggaattatagggaattcctgttttgtgtgtaattttctactgatttcagaatttttggaaagctttactatagtatccaggtgcattgtcagttttgatttttttctggaactcccatgacagcaaaacaagataataaatgttttttcacatgggaagtactttctcctgtctggcaagttgcccacatgaaatgtgaataagtaccaactgttacacggacacatcataatcttttaaatgaaggtacatgtgtgacatctatttgccataatgcattaggacatagacttctgggattaactcctgcctcttgagtgggcaggtgtaggacttgacactgggtgcaatgttgtacaatatcttttgcctgttttcatgtgacatcaaatttgttttttaatcctgctgcatttacatgagtcaaagcatgaagttcttgtgcttttatgaatgcagatggtaccagtaagtcagcttgttcatttgctttagctaaaggccctggtaaattagtgtgtgctaaaatatgagtaatatgaaatgggaaatttttttttcagtttgttgtaataaactgaacagctcgtttaactgatcatctatgctatatttaattagagctgtctcaacatcccttgtagcctgcgctacatatgcagaatctgatacaatattaataggttgatcaaagtcttataacactgtaatgactgcaaccaactctgctctttgagccgattgatattgagttttgatgactcgctgttttggccctgtgtaagctgcttttctattgctggaagcatcagtaaacactgtcagagcattttccaaaggtttatgtctggtaattttaggtaaaatccaagtagtcaattttaaaaactggaagatttttgtttttgggtaatgattatcaataattcccacaaaattagtaagaccaatctgccatgcatcagaattgataaaggcttgtctaacctgttccttgtttaaaggaacaactattttgtctgcgtcattttcacacaattttattatttgtaatcttgcctgaccaattaatgtagctatttgatccaagaacaatgtaaaagtcttaattgtactgtgaggaaggaatgaccactccacaagatcagtattttgaacaatgatgtctgttggagaatgtgcagtagcaaaaatcaaaagttggagtggggttaagggacctttgtgctgactgatttttttcttttactaacttaattttttttgttgcctctggggttaatattcttttactatttaagtctgggtcccctcttaagatagagaacaaatttgacatggcataagtaggaatgcctagagttggctgaatgtaattaatatctcctagcaagttttgaaagtcatttaatgtttttaatgtgtcttttcttatttctactttttgtggcttaatttttctattttctatctgcatctctaaataatgaaaaggagtagaggtttgaatcttatcagatgctattgccagtcttgcgttggcaacctctgcttgcagaaatgtgtaacagtcagttaatttgtctcttgtttctgcagcacacaaaatatcatcaacataatgaatgatataacagtctgaaaacttatctctaactggttgaagagcttgacctacgaaagtctgacaaatagttggactattaagcattccctgaggtaacactttccactgagacctggtggctggttccttataatttatggctggtatagtaaaggcaaatttttcaaaatctttctccaccagaaaaatggtaaaaaagcaatcctttagatcaattataattaaaggccagtcttttgggatcatgaccagagaggacaacccgagttgaagaggccccatgggttgaatgatggcatttacggctcttaagtcagttaacatacaccatctgctggattttttctgaattacaaacacaggagaattctaaggagagaaagtgggtgaaacgtgtcctttttaagtagttttttaactattttatgtagcgcccccaaattttccttagggagcagccactgtttgactcagacaggatgctgcaaggcaagtctgaattgctccttcaccataatgaactgtaagttgggcaataatgggcacagcgagccaagttgcagtgagcctagtttcaggctccctcccccagcactcacttggctgaggaggaggtggccatcgtggttttagcccctatgaccccgatgattctggacctttttcttttaactttaatgtttcagaatatattacctcttgtaattgattgtagtcaacattttgctttgaccgacccattacagactctgctacatatttacaatgtgaactttccgttcctttctgggattctgtccctgtctcttcttcacaatctattacatagcttttagggccatcagaaactgaaacgctgtcttctcctgtttgaaacggttttaaagctgctttaataatggcccaatcattccataccataagtgggatgattttaccctccctacttctctgttttaattctttgccaattttttcccaatcttttagatctaaagttccctgttctggaaaccatgggcagaattgttctattgtttcaaatagcttgattagattttctgtagagactctaactcccccttttcttaaaagaattttaataaagctgagataagaggcatatttacttttagcttgtcccattgttaccctggcttttttcgagctcaggagcttaccgcaaggctgaccgtagaagtacttgggaatctctcgttgacttgtcctcaataaccacgctcaagcgtaggtttaccctagagaaaagccccacattagacaccaggtgaaggtggccagcccctctacacctgtgagtcttttttgtcaggtgggacgagagactgagaaaagaaataagacacagagacaaagtatagagaaagaacaaagtatagagaaaggaccggcgctcagcatatggaggtcctgcacaggcactggtctctgagattcctcactatttattgatcattatctctaccgtctcagagagggggatgtggcaggacaatagggtaatagtggggagagggtcagcaggaaaacatgtgaacaaagatctctgtgttatgaataagtttaaggaaaggtgctgtgttttgatgtgtacgtacacaaacatttcagtgcattaaatggtagtattgctgccagcatgttttacctctagccctaaggtggttttctcttatctcagtaaacagaacatacgatcaggttttacaccaagacattttatttttagggaggagcaggagacagatgccttcctcttatcttaactgcagaggccttcctcttttattaatcctcttcagcacagaccctttatgggagtcaggctgggggacagtcaggtctttcacttcccatgagacaatatctcaggctatcacatggggagaaaccttggacaatacctggttttctgaggcagaggtccctgcggccttccgcagtgtattgtgtccttgggtatttgagattagagaatggggatgacttttaccaagcatactgcctttaagcactttttaaacaaagcacatcctgcacagccctaaatccattaaaccttgagttgacacagcacatgtctctgcaagcacagggttggagctagggttacagattcacagcatctcaagacagaagaatttctattagtacagaacaaaatggagtctcttatgtctacttctttctacatagacacagtaacagtctgatttctctttcttttcccctcacttatcttttctaccatctgaccattttgttcagatctgctgaacatagtgtgaacgtgacacatagactgagaagtgcaattcaagctaaatatcccttaggggaccagtcaataatgattccatgggaatcattgtgcagcacctctgcctgttctgcaatgcaatcttgctaaacaaatacgttcattttttctaactgagtccaatcctgtttacaaataggtttttgggggttgtatgcctcaattacaggagcagatttattatggtaaatactgagatcagaaagcatgtgtaactgtgtcatacagtgatttacatccaggcattattaccagctaagattgataaatatgcctaataagtacaattgttctctgtgtcagcctttgttgaaggaatactcacagaaatggtgatcactgccatcatagctaccattaaattattcactgtgagtggttgtcctgctttcctcaggttgtcttcctggatctgtgacagcttcttgatctgtctccaggtcggtggctgtattcgatgggtgttgctcgtgacagttggggtcctcctcggcaccagccttgacatggctgcaaccgggggggtcctcaggatcctcccggaatctcttccttggcatctggcccatgacaagatttcaggtgtcttgatggtatccaaactgactgatgattttggcctggagaaacacaagcataacctctaccccaagttattattttacctatttcccaaatttttgttattggatctctctgccaaatcattcttctgcttctgtctttgcagctggtttctgtagatgctgttcagctgctgataacatctggcctttgggcaggctcaaaaaatttaaagttaataatgccagattcagttgctcctgtggtgttccatattctctgtctccccctttctgcttttgcaactgctgttttagggagagattcattctttccactatggcttgtccttgagaattgtacgggataccagtaatgtgtttaatattcctcatagagaaaaatgtagctagaacttggctagtatagcctggggcattatctgtttttatagaagcgggaatgcccatcaccacaaaacactgcaaaagatgacatttaacacaggcagaagactctcctgtttggcatgtaagcccagacaaagtgagaaaaggtgcccacacatacatgtacataagctagtctcccaaacgagggaacatgtgtgacatccatttgccaaaccgagttaggttccaatccttgaagattaactcctcctgtaaaagatgaggaatgtatcatttggcaagttgggcatcagtggataatatttttagcttctttccaggtaatgctgtatctgcatttgagaccagaggcattaacgtgggttaaatggtcaaaatgtctagcattagatattgcattagcaactaagtgatcagccatttgattcccttcagtcaaaggtcctagaagaggtgtatgagcccaaatgtgagtgatgcaaaaatggtgcattctacttctaactgctgtttgcaattgggtaaataaagtcatcagttgttcatctgtatgaaattgtaattgagcattttcaattaactgtgtggaatgaaccacgtatgaagaatcagaaatcacattaataggtatatcaaaagcagtcaataactcaattacagctactcagctttttgagctgaagtatagggcgtctgaaaactttactttttgagccaaactaagaagctttaccattactagacacatctgtgaaacaatgaaaacgcttagcaggctgcaggttgtttactgcaggaattgtaaatgcaaaccattcacagtcttgttcagctaaggggatagtaaagaaacagtcttttaaatctatgactactaaaggccaatttttggaattttagtaagagaaagcaatccttgctgtaatgctcccataggttatatagttgaattgatagctcttaagtcagttaacatcctccatttacctgattttttcttaattatgaaaactggagaattccaaggggaaactgttggagcaatatgcccattttctatctgttcagtaactaatttctctaaagcctccagtttctctttacttagtggccattgttctatccaaattggcttatctgtgaaccattttaaaggtataggttctggaggcttaacaatggccaccatcaaaaattatttcctaatctttggcgggaactttttaaaccttgcaaatttttttgtagtcccataccagggacataccccatttcatgcatcatatgttgactttgagggctatataattgttctggaattagaacttgggctctgcattgttgtaataaatctcttccccataaatttatagatacagaagttataattggttgaatagtctcgggttgtccatcgggcccttcacaaggcaaaacagaactactctgatatacttcaggggcttcaccaactccaactatgttaaattgagtgggttgaattggccacgtggacggccagtgctgtagagaaatgattgaaatgtccgctcttgtatctaccaaacctttaaatttctttccctgaatagttatttcacaggtaggacatttatcagtaatttggttgacccaataagctgctttgccttgtttatttgtgcttccaaatcctcctgttcgtttaatttcactttttcccatttccacatatggcacaatcaggagctgtgctatgggctctcctggctctgctttccaggaaacataagtaggtataacaatttgaatttccctattgtaatctgaatcaatgactcctgtatgtatttgtaccccttttaaacctaaactagactttcctaaaagtaatccgattgtacccgctggcaagggtccacagactcctgttgggaccttttgcgggggttccccaggtagaagtctcacagcttttatgcagcataaatctactgtggcactaccggctatggcgggggacagacattgtacaggggtgagggaatggtctgagctggaaatgcccccgtttagaatggggcccgggacaggcccctcatggcatttcccgaaatcgtattcccatctttatgaaacttagagggacactgattagcccaatgttttccttttttacattttggacatatttcaggatctgcagttttcttttttcccctatctggtggcctgattcgctgattttttctacatttgtttttagtatgaccatgcttcccacagttaaaacaagcgccaggaaatggagtatttcctttgtccactctcagtcctgccattgcctgtgccaacaaggcagctttatgcagattacctccgataccatcacaagccttgatataattaactaaatgtgctttccttctaataggtcacagagcagcgtggcaattgggattacagagcgagactccatctcaaaaaaagaaaaaaaaaaagcattgtcaaaacttaataactgcaacactatatcctgagcagctgaatctgcaatcatctttttaagagacttctgtaaccaagctataaaatcaacgtatggttctcttggtccctgtttcatagcactaaaggaagggtattgttctccacatgaagtgattttttcccaagctctaatgcacactcctctaagctgttctatggcatcatcctgcatgaccagttgggcacctaagccagcccagccaccaacccccaaaagttggtctgcagttacattaatttgaggttgggcctgggcattgcgagcagcctgaatggaagcttcatctgcccaccaagttttaaattgtaagaactgagcaggagttagataagctcaagtaagacagtcccagtcagtaggtatcatctgactggaaatagcaacattctttaacagtcccattacaaaaggagaacctggtccatactgatttataacttgtttaaattctttgagtaacttaaaaagaaaaggctcaaatatagttgtaatatttccctgttgatctggggggtgtattctaacagggaactgccaagtctctaaatcaccctctcttctagcttgctgaattcctgcctgaatagaactaagagcgattgcttgaggcactgatcaaacagtcactggggcaactccttttcacccagtgttctccagaaaagaaagatctggaaggtcattttcttcaaaataataatgagggggtgcagaaaggtagggatgaacctcttcctcttttgccgctttagctttagctggcaaataaacctgctctgtaacctcttctgtcacttcctcctcatcataactgtgaataagttccaaggtggaacgaaccagaccccacacctgtcccattgttaccctgaggcttctgagctcctcttgttactcaccacagggattgctttaagagtacttgggtgtcctccagctagttttccattccaactgtcgctccggtgacccttcaacctggattcgagcccccatgaaggtacgccacttgccgagaccagctcagtcagggagaccctaacccagtggtgctacaggaatgaaagacacacacacagaaagatagaggtgtgaagtaggaaatcaggggtctcacagccttcagagctgagagccccaaacagagatttacccacgcatttattaacagcaaaccagtcattagcattctttctatagatattaaattaactaaaagtattccttatgggaaacgaagggatgggccaaattaaacgaataggttgggcttcttaactgcagcaggagcatgtccttaaggcacagatctctcatgctattgtttgtggcttaagaatggctttaagtggttttccaccctgggctggccaggtgttccttgccctcattcccgtaaacccacaaccttccagcatgggcgttagggccattatgaacctgttacactgctacagagattttgtttttggggggcttgctcccaacaagtttggccttcccacctctatacagtccgataacggaccagcctttattaggcaaatcacccaagcagtttctcaggctcttggtattcagaggaaccttcatactctttaccgtcctcaatcttcagaaaaggcagaatggactaatggtcttttaaaaacacaccttaccaagctcagccaccaacttaaaaaggactggacaatacttttaccactttcgcttctcagaattagggcctgtccttgaaatgctacggggtacagcccatttgagctcctgtgtgaatgctcctttttattaggccccagtatcattccagacaccagagcaacttggactgtgccccaaaaaacttgtcatccctatcttctatctagtcatactcctattcacccttgtcaactactcataaatgccctgctcttctttacactgccagtttacactgtttctccaagccatcacagctggtatctcctggtgctatccccaaaccaccactcttaactcttaaagtaaataaataatctttgctggcaaggctatgctgaacctccttaggcactctctaattggatgtcctgggtcctcccaattcttagtcttttaatacctgtttttctccttctcttattctgtttagtttttcaattcatacaaaaccatatccaggccatcaccaataattctatatgacaaatgtttcttctaccaaccccacaatatcaccccttaccacaaaatcttccttcagcttaatctctcccactctaggttcccacgccgcccctaatcctgctcaaagcagccctgagaaacatcgcccattctctttccataccacccccaaaaattttcgccgccccaagacttcaacactattttgttttattttttatttattataagaagacaggaatgtcaggcctctgagcccaagttaagccatcatatagcctgtgacctgcaggtacacatccagatggcctgaggtaactgaagaatcacaaaaggagtgaaaatggcctgttcctgccttaactgatgacattactttgtgaaattccttctcctggctcagcctggctcaaaagctcccccactgagcactttgtgacccccggccctgccctcaagagaacaaccccctttgactgtaattttcctttatgtacccaaatcctataaaacagccccacccctatcactctcgctgattctctttttggactcagcctgcctgcacccaggtgaaataaacagacttgttgatcacacaaagcctgtttggtggtctcttctcacagacgggagtgaaatttactgcagaatatttcccaaagtctcataatgatgcagaaatacatgtgtacaagacttgttctgacacctggcacagaactgacagtagtggctccccagggaggctggaaggagggtggaggacgtgacagggaagtgacagggaaaggagatgctttatggacaagggcctaagctgcagctttgcttggagcgttaccacaaaacaaatacatacatcatgtgatgtttaaatatcacaatatatatttaataataattggtggggctgagcacggtggctcgtgcctgtaatctcagcactctatgaggctgaagcaggcagatcacctgaggacaggagttcaagaccagcctggaatcccagcacttagaaaggcaaaggcgggcggatcacgaggttaggaaatccagacagtcctggctaacaaggtgaaattctgtctctactgaaaataccaaaaaattatccgggcgttgtggcactcaactgtagtctcacctactcgggagcctgaggtaggagaatcgcttgaacctgggaggcagaggttgcagtgagtcgagatcacgccactgcactccagcttggctacagagcaagactccatctcaaaaaaaaaaaaattaaccagccatggtggtacgcacctgtggtcccagctacttgggaggctgaggcttggggatggcttgagcctgaaggaggttgcagtgagctaagatcatgccactgcgctccagcctaagcaacacagcgagaccttctctcaaaataaaatcaaatatatgaaaacagaataactcaaagtacgaaaatccattttgtttatataggtccgcaaaataataaaacctacacagactcacaagaaactagatgttaacaaaaaaagttgtcattttccccagattttcttttctttcttttttttttttagacagggtctcgttctgtcgcccaggctgcagtgcggtaatgcaatcttggctcactgcaacctctgccttctgggttcaagtggttctcctgcctcagccagagtagctgggattaccggtgcccaccaccatgcccggctaacttctgtatttttagtaaagatggggtttcaccatgttggccaggcttgttgtgaactcctgacctcaggtgatccacccacctcggcctcccaaagtgataggattacaggcatgagccaccatgcccagcagattttcaaaatatatacatatgtgtgtgtaaatatgcatgtatatgtatgtgcatgtgtatgtgtgtgtgtgtatatatgtatatatatatatatatatatatataaagattttaaaaatataaaaagtaacaagatttgtttaactgaagaggaatctcatcttgctagaaaatgacactttggcagttgggggtaggggggaatcttgtcagatctaagaaaacaggaaatgccccatgctagaagaagcaatcaccctttcaactgactgacctggaggaagcttcagatatctgtagtaatgcaggcatgtggagaggcagccactatggcactccttatacaaggaaaaatctcaaaggatccacatgttgtcattcagccaatttccaaagcagatgtcaaagagcaagctagccatgtttactaacttgacaacatgtaaattttcgcaactagcaggatcaaatatcaaagtaaaatatttactaaaacacaaagaagaaaacaacagacgctggggtctacttgagggtagagagtgggaggaaggagaagactagaaaaaatagctattgggggctgggcacagtggcttacacctgtaatcccagcactttgagaggctgagaggcttcgatcatctgacatcaggagttcaacatcagcctggccaacatggtgaaaccctgcctctactaaaaatacaaaaattagccaggtgtggtggtggcatgtgtttgtaatcccagctactcgggaggctgaggcaggagacttgcttgaacccaggaggctgaggttgcagtgagccgagatcatgccatcacactcgagcctgaataaacaagtgcaaaacttagtgtcaaaaaaagaaaaaagaaaaaaaaaactattgggtactgggcttgatactggagcaatagaataatctgtacaacaaacctcaatgacatgagtttgcctatgtaacaaaccatcacatgtagccccaatcctaaagtaaaaacataaatataaaacgttttatttttttaatttactacagaattatttttaaagtctcataatgatgcagaaatacacgtgtatgagacttgctttgacacctaacacagaattgccagtagcggctccccagtgaggttggaaggagggtggaggacgtgacagggaaaggagatactttatggcaaagggtctaagctgcagctttgctcggggttttactagaaaacaaatatatccatcacgtgatgtttaaatatcaaaatatctatttaataataattggtggggctgagcacagtggcttgtgcctgtaatcccagcactctgggaggctgaggtgggcagataacctgaggtgaggagtttgaggccaccctggccaacatgatgaaaccccacctctactaaaaatacaaaaaaattaaccgggcctggaggcacatacctgtaaccccagctacttgggaggctgaggcaggagaatcacttgaacctgggaggcgcaggttgcagtaaactgagatcatggcactgcactccagcctgggtgacagaggctgactccatctcaaaaaataaattgtaaccatttttaccgaaaacacctgtttcacaagcctctccacagtaaccccacagtctccatgagcttaatgtgctaagaatggtttaatgaatctcctgctattatttaggttgatttcctattcttaaactaatgatggaataaaacaccttctatcattcatgtctgtgtatgaactttccattctaattagtacaatttttggagtcagaaacacagtaattcactaaattacctaaaaatgtagtataaaatcagggagaaaagattttttcttattggtctccttttctagaatttagacctactttgtgcacattaatacgtgacttccattggcagctgctctaatcctggtccacagagagatgacagagcatccagatgtggcccctgaacaatccctgctgcccaacagcactgacaccatgggaccctcactccgtctccatccatgtctgggtgtgagcccttcccaggaccatgcccagtgcagcctctcctatgttcatgtcactggatcatgaaagataaaatctaagccagataagagggaatgagggaaggcatgggtgagtgtgagcaaacctgtcaggaaggatgcttcagactcagagaagactcccaactccaaggcccagcgttactcaaaggaaggagacagaacaatccaccgagaatatcatctcacctgaggaagagccatccctgactcctttgctttcctcttcctcttctgggtttcttcctcacgtaccaaaagtctttagaagtcaatcctgaatgttaaaaatatgttatttattgctcagaatcaacacatgccctccctgtaacacaatcacacaaagtgtaatgcacgtccgtgtgaagagaccgccaaacacaatttgtttaaataatgaggctgtttatttcacctgggtgcagccgggctgagtctggaaagagagtcagcaaagtgtggtgggattatcattagttctcataggttttgggacaggcggtggagttaggagcaatgttttgcgggcagggggtggatctcaccaagtacattctcaagggtggggagaattacaaagaaccttctgaagggtgggggagattacaaagaacctttttaagagtgagggagattacaaagtactttgatcagtcagggtggggcagaaacaaatcacaatggtggaatgtcatcagttaaggccattttcacttcttttgtggatcttcagttgcttcaggccatctggatatatacgtgcaggtcacaggggatatgatggcttagcttgggctcagaggcctaactaaagacctcaccctgaggaaatagtccccccttctgccctcctaaccatggatgataaactcctacagggaaactcccgctccccttctggaggagtccacacacaagctgcagcagtggggagctgggctggaatgagctccccttcagggcacagacccagccctgaccgaaccccacgcagaggctgggtgcggtggctcatgcctgtcatcccagcactctcggaggccaaggcgggtagatcacttgagctcaggagtttgagaccagcctgggcaacatggtgaaaccccatctctaccaaaaatacaaaacttagccaggtatggtggtgcatgtctgtgtgtctgtggtcccagctacttagaaggctgaggtgggaggatcacttgacctgaggagtttgagagcagcctggccaacatggtgaaaccctgtatctactaaaaatacaaaaatgggccgggcgtgtgggtcatccggtaatcctagcactctggaaggccgaggtgtgctgattacttgaggtcaggagatcgagaccagcctggccaacatggtgaaaccctgtctctactaaatacacaaaaagtagccgggcttggtaagtgtctgtaatcctcactacttgggagacagaggtaggagaatcgcttgaacccgggaggtggaggttgcagtgagccgagattgtgccactacagtccagtcttggtgacagacaaagactcaaaaataaaagaaaataaaagtaaaaatacaaaaattagccaggtgtggtggcagacacctgtaatctcagctacttcggaggctgaggcacaagaattgcttgaacctaggagacagaggttgcagtgatccaagatcacgagactgcgctcacagcctggacgatagagtgactcagtctcaggaaaaaaaaaaaaaaaaaaaagcgcatttctgatgtgattgatgcagagataataaaacctgagtaacatgatgcagactgatgggcagagggaacttcagacgggggtgggagggcatgggagacagctctgagcctagatctggaggagaaatggacagggtacatagggtaagagcagggacaatgacagggttttgatgtttgggaaaagagaaaagcaaatgtgactggggcaaagggattcatgagatgagggcaagctcccaggaggaggctggacactggcaggggccctggacacagggctgtggagccacagtgaggggttgggcttttgtcctggggaacacgggaagccggtggagggttccctgccagggattgacgtgacctgctttagatttcgctgtgatatcctcatacagagaaaggccccgaagatggtctctgtgtctgagtctacctctgtttcttccattcttctgcttttgttttttattttgagggcactgcatcccattgaaaattctaatcacaactgggcactcctctcctcaaaaaaataaaaaaaaaaaagccacacccagacacgcactccattttgccaatcatttcaggggccagggtcactcgggttgagcttttctggtctagtccctcgtcgccaagttgcagggaggctcactggggctcagatcggaagacattttcaccaagttaccctacgaatgtctgagaggagtgagaaggtgtgcctgaattcttacatgggggcctggaggggctaataggaagggttggtcttatcatcctcatcctggaaaattagagaagcctctttcacaaacctgggctaaagaaacttcttttgcaaggttctgatgccattgattcctgacagttaattcttccttacaggaaaatcacaggaatatttataaaatgcagaagtgtgaacacacagctattgaccttgaaaacagggaaagaaggtcaactgtagcactaagaaataagcaaattgtttcaatcaagaatacatgagtggtcaggcatggtggctcacgcctgtaatcctagcacttttgggaggtcgaggtgggcagatcacctgaagtcaggagttcgagaccagtctggtcaacatggtgaaaccctgtctctactaaaaatgcaaaaaattagccaggagtggtggaaggcacctgtaatcccaactacttacttggtaggctgaggcaggagaatcgcttgaacccgggaggcagatgctgtagtgacacgagatcgcaccattgcagtccagcctgagcaacaagagcaaaactccatctcaaaaaagaaaaagaaaaagaaaaaaaaaacagaggccaggcggggtggctcatgtctgtaatcacagcacattgggaggccgagtcgggcggatcacaaggtcaagagttagagaccagcctgacaaacatggtgaaaccctgtctctactaaaaatacaaaaattagccaggcatgttggtgggtgcctgtaattctagctactcaggagactgaggcaggagaatcacttgatcccgggaggcagaggttgcagtaagctgagatcacaccactgccctccatccaaggcgacagagcaagactccatttcaggaaaaaaaaagaaaaagaatacatgggtgcttttggaggagagttccatgccaatccagcccatgtttcaacatttttccagaatggaccagagggccttgagggaaacacgcaataaatagctcccagctcaagattttaacaaatgacataaggaaagaaaactgaaaaacagactaactggttaaactacattttgatgtttagttaaaaggtcactgacatctataccaagtacacactgaaacaatcaaacttaagtattgggtatgaaacgcttccaataaataacaaagaccagaaagcatgcagacttcgatctgaactggatgcaactaatttcaaacagcaactattttttttaatctaatgaattctggggtcaactggaaaagaacaggagaatatacaagtacagaaatgaatgatgtgagctgactatacgatgctgcaaaggcatctttcagatgtgattatatactatgaaagaaatacaatttttaaaactaagatttatctcaaactcaaactgcaaaaaaaaaaaaaagagagaaatgaagaggaatcagaaaggaaaaaaaaggaagtctattgaacaatgagaacaaaagcatttttaatgtttttttttaatattttttgtttgctggtttctttgagatggagactgactctactgcccaggctgagggcagtggcacgattttgcctcacggcaacctctacctcccaggtttaagcgactcttgtgcctcagcctctcaagtagctggaactaaaggtgcacaccaccaccccccggctaacttttgtatttttagtagagatggggtttcaccatgttagccagggtgctcttgaacttctgaccttaggtgatccactcacatcagtctaccaaagtgttgtgattgcagggatgagccaccatccagctttgatatcctttttttttttttttttttgagacagattctcactgtcgcccaggccggagtgcagtggcacgatgttggctccctgcaagctccgtctccaggattcacaccattctcctgcctcagcctcccaagcagctaggactacaggcacctgccaccacgcctggctaatattttatatttttagtagagatggggtttcaccgtgttagccaggacggtctcgatctcctgaccttgtcatgggcccgtctcggcctcccaaagtgctgggattacttacatgagcctccgtgcctggcctgatctcccttttataaagtactatatcaaaaaagtactatctctttaaaaagtactatctcaaaaaagaaaaatagaaaataagaatcaaaaaacaggctgggaaaagtggctgacatctgttggccatgctggtttcaaacttctgacctcaagtgacctatgtgccttggcctccaaccgtgctggaattacaggtgtgagaaaccacacctggcccaatcctcttaacataaacacttgaatgtcaattaagggttgaactcaatgttaagtcaacacaaactcaagtcaatgctggactgactctagtgtcaattaatgcttgatggtttgctatactcactgcattgggaacagttatctcaaaaatgaattttctgatgttctgcaaggagtgacctcggactcaagaccttgccacacttctgacatttgtaagatttctgtccagtagggattctctgatgtctaatgaggtgtgaacatgaagtaaaggctttgccacaatcatcacacatgtgaggtttctctcctgtatgaattctcctatgttttgcataggatgaagcttgactgaagaccttgccacagtcatgacatttgtaaggtttctctccagtatgagtgtgtcaatgaactgcaatgtatgaatgatgtctgaaaaatttgccacatttattacacttgttagatctttattcattatagattctccaatgatttgcaatggttgtagcgttactgaagactttgtgacaatcattacattagtcaagtttccctacaccatgaactgcctgatggtgaataagtgttgactgcttgctaaaggctttgccacactcattacacttgtaaggtttctctccagtgtgaagtccagtatgttgtttcaggtgtgaatcactcccaaaagtcttgtcacaaaccttacatttgtatggtttctttccaggatgaattctcctatgtcttttaaggtgtgatttgcgactgaaaactttgtcacatgtttcacatttgtaaagtttctccccagcatgaattctatgatgaagtgaaagttgtgattgttgattaaaagccttcccacattcattacacttgtaaggtttctctgcagtgtgaattctggtatgtcttgccaggtatgaattacgcacgaaagccttgtcacaaaccgtacatttgtaagatttctctccagtatgaagtctacgatggtgaacaagggatggcttgtgactgaaggtcttgccacactcattacacttgtaaggtttctcaccactatgaagtctacgatggcaatgaaggtatgacctctgactgaaggtcttgctgcactcattacacttgtaaggtttctcaccactatgaactctgcgatggcttgcaaggtatgacctcagacggaaggtcttgctgcactcattacacttgtaaggtttctctccactatgaattctagtatgttttgccagataggaatgacacgcaaaagccttgtcacaaaccttacatttgtatggtttctctccggtgtgaattatcttatgtgtctcaagggttgatccacaactgaaaaccttttcacattcttcatatttgtaaggttgctctccagtatgaattgacttatgaattagaagatctgaattttgaccaaaggtcttcccacattcattacacttgtaaggttttcctccactatgaattctagtatgtcttaccaggtgtgaattccacgcaaaagccttgtcacagaccttacatttgtaagatttctctccaccatgaagtctatgatggcatacaagggatgacttgtgactgaaggtcttgccacactcattacacttgtaagttttctctccagtgtgaattcttttatgtcttgccagctgagaattccatgtgaaagctgtgtcacaaaccttacatttgtatggtttctctccagtatgaattctcttatgtgactcaagggttgatttccgactgaaaactttgtcacattcttcacatttgtaaggtttctctccagtatgaattctacgatgacgtgcaaggtttgattgctgattaaaagctttgtcacattcattacacttgtaaggtttttctccagtatgaattgccttatgaattacaagggctgaattttgaccaaagatcttgccacactcattacacttgtgagattttactgcagtgtgaagtctacgatggcatgtaagggatgatacctgactgaaggactttccacactcattacacttgtaaggtttctctccagtgtgacatctacaatggcatgtaaggtattgcttgtgattaaagagcttgccacatacatcacatttatattgtttgtctcctaaatggggtatctggtgtttccttaagagtgagctacaattaaaggctttgccactctcattacattggaaagatttttctctcatgtatacttcctgtttttgtgggagtagtgaagaattcggggaattattcccatagttattagaaatatggatttggggcctaggagaaattctttgggatgttgaaaccgagggagcatcactggtagacttctcaaattgattaccaattttacctttgatctgaattatgtggagttcaggcagatgtgaataaaagcttgatccaagctgatctttaataggcttgtttccagcatgcctgtgatcatgttggtctgtgctaccagtcaacttttttatttttgtcatgggtgcttcatggccatttctttcatcttcttgacactgaaactcaatatcatgaatttctttctcaatttcctggaagcaaaaatctccaatgtgataactttgatatctttgcaatgtccctgtgtggatcacttctgtattgccttgccctgttgacaagacctccttcatcatgcgtttggaagagatatctacaaaatataaacaacaataggtttccaattaagtacagatggtaaatcatactgaagtgtgtaaatatgacacaaaaaacaatacttattttgaacttcccaaatatcatcttcaaagtttaggaacacaaaaggagtaagattctttaataaacaaggggcaattacatgtccttcaaatcaattctatgaaagtctatttcctatgtcatcacaaaacactgacagggcacaaacgtgtaagcctaaggtaaggagtatttttccactgtgaccctaaagtgtatcacaatttgcaaaaaacatatcactgtcacatcaatgaagagaaaaatatatatttttcatatttaaaccatatttactgtgtacaaatgctaaaaaaaaaacaaagaaacccacacaatatactatattggtaaataatccacaaactcatgtaaggataaccaaaatcaatggaaattctgtattttcaaacaattatagcaccgagaagagaagattacaaaaattaaccaggtgtgctggcccgtgcctgacagtcacagcaacttgggaggctgaggcataagaatcacctgaacctgggaggcagaggttgcggtgaggcaagattgcacctctgcactccagcctgggtgacaaagtgagactccacctcaaaaaaaaaaaaaaagcaaaaaaaaagttaattcaatatttttctcaataaatgtcataaaattacctatatccacacaggacaggcacttaatgacttttcaaaaaatttttgtatttttatttttttgagatggagtcttgcactccagcttggagtgccatggcatgatctcagctcactgcaacctctgcctcctgggttgaagtgatcctcctgcctcatcctcctgagtacctggggttacaggcatgcacaactatgcctgggtaatttttgtgtttttagtagagatgtgtgggcagcaagccaactaggtgccaaggcaagagttcgagggcacaagctgttccaatataataaaatatataaaataacaagagttatactagatctagatcatagacatgattatatatgaatgtcattaatcattagttggtagcaattactctttattccaatattataataatcctcgctctataatcataacctaagaaaagccaggccatacagagataggagctgaggggacacagtgagaagtgaccagaagacaagagtgcgagccttctgttatgcccagacagggccaccagaggactccttggtctggcagtgatgccagcgtctgggaagatgcccgttgccaagcggaccatggtctagtggtagcatcagtgccaaggaacaacacccgccacttagcagaccgggaaagggagtctccctttccccgggggagtttagagaacactctcctccaccacctcttgcggagggcctgacatcagtcaggcccacctgcagttatccggaggcctaaccgtctccctgtgatgctgtgcttcagtggtcacgctcctagtccaccttcgtgttccgtcctgtacacctggctctgccttctagataacagtagcaaaatgagtgaaagtactaaaagtgtctgatatgcagaaataatggcgcaagctatctctctctctccctctctctgcctcggctgccaggaagggaagggccccctgtctagtggacaggtgacccacgtgaccttacctatcactggagatggctcacactccttaccctgcccctttgtcttgtatccaataaatatcagcgcagcctggcattcagggccactacccatctctgcatcttgctggcagtggtcccccgggcccagctgtcttttcttttatctctttgtcttgtgtatttatttctacagtctctcatctccgcatagagagagcaaaacccaccgaccctgtggggctggtccctacagagatggggtttcaccaggttgaccaggctggtctcaaactcctgacctcaagtaatcttcccgcctcagcctcccaaagttctgggattacaggtgtgagccactgtacctggtggcactttgtgacattaatgagtggagtgtggcagttatattgcataccacataccgaaaagccatatgcaaaattataaaaattaattaataaaatattgtaacccatgataaaaccagcaagcaagtaagtacatttatacagcctgcagaattctaaacaattccctcttaagaaaaaagccacaacatctacttaaccaccagcacacaatataagaactgaaatacatgttaagatcactaccttctcatgtatgaggtcaagaaaatacacagcattttaagaaataagaattgactaatggctggtaacggtggctgacacctgtaatcccagtactttgggaggtggagacatgtggagcacgaggtcaggagttcgagaacagcctggccaacatggggaaaccccatctctactaagaatacaaaaaaaacagctgggtatggtggcagacacctgtaatctcagctactctggaggctgaagcaaaagaatcatttgaacccaggaggcaaaggttacagtgagccgagattgtgccattgcactccagcctggttgacagggctagactccatctcaaataaataaataaataattgactaatagtgtagaaaagtacaattatgatgtcacaactacacttatgtaacagccaggcaatacagcaattttacatttgtgcattccccatagttatctagttcactatgcgtaagatataaaacatagaatgtgtactgggaaaatttataaacagatcagagaaaatattgtataaaacaaattgcacaataagaacaaaaaatatgatgtatgttccctggcccgaatgttcaccttggctaaaagtcattatcagatttcttattctccaataaggatgttcctgcagttggggtcttttagagaatttggtcatgggtgttgactaattgtgaataggactagggcttttaattgtattttttctttctttatctacttttgagacagagtttcgctcttgttgcccaggctggagtgcaatagcatgatctaggttcaccacagtctctacctcccaggttcaagcgattctcctgcctcagccacccgagtagctgggattacaggcatgtgcaatcatgcctggctcattttgtatttttagtagagacatggtttctccatgttggtcaggctcgtttcaatctcccgacctcatgtgatttggccgtcttagcctcccaaagtgctgggattacaggtgtaagccaccacgactggccaggactactgtttttataaaaagagacagtaaagagctcattgcctgctcctctttcccccatgtcaggacactgcaggaaggtggctgggctaaaccacgaagaaggctctcaccaggagccaatctagctgacatcttgttcttggatttcccattttccagattcatgagaaataaatttctatgtcttaagctttcaagtttcagctatttctttttttttgtctgtcatgcttcatcacccaggctggagtgcagtggcacgactctcctacctaaagagattctcatgcctcagcctcttgagtagctggcactacagatacatgccaccatgcctggctaattttttttttggaaacagagtctcactctgtcacccgggctggagtgcagtggcgcaatcatggctcactgcaacatccatctcccaggttcaaatgattctcctataggtctcagcctcacaagaagctgggattacaggtgtataccaacacacccagctaatttttgtatttttaccagagatggggtttcaccatgttggccaggctggtcttgaaattctgacctgaggtgatccacccgtctttgcctcccaaatttttgggattatagtcgtgagccatcacgcccgtccaattttttttaatttagtagattcaaggtttcattatgtttgcccgactgctctcaaactcctgacctcaagccatctacccacctcagcctttcaaagtgctggaattagaggcctaagccactgcggctggccagtctaagctatttctgacagaacagtgaaaagagtgagataggaaaagaggcatctcatcatcaacatcactgaaggctgacaaatcttattaaacaaaggaagttgagtgtgtactataaaacttatatgaagccatctaatagtattcacttgttttaaaaagcaggtggacgaatcacctgaggttgggagtttgagaccagcctgaccaatatggagaaaccccatgtctactaaaattacaaaaattagccagacttgcaccaggcataatcccagctacttgggaccctgaggctggacaatcacttgaacccaggaagtggaggttgcggtgagctgagattgaaccaatgtactccagcctgggcaagaagagggaaactccatttaaaaaacaaaaaaggccagacacagtggctcaggcctgtaatcctagctctttgggaggctcaggcaggtacatcacttgaggtcaggagttcgagaccagcctggccaacatggtgaaaccccatctctactaaaaatacaaaaattagccaggcgtggtggtgcatgcctgtaatcccagctacttgggaggctgcagaaggagaatcccttgaacccgggaggtggaggttgtggtgaactgagattgtgccattgcacttaagcctgggcaacaggagcaaaactccatctcaaaaaacaaacaaacaaaaaccaaaaaccaaccctggaggcaaattaacattatttctcaaataacaaaagcaggcccgcggtgttcatggacatgaccccagtttgcacgtacggtaagtgagggacaagacttgatcctgggcatgaaggatcccatgacatgttcttaggcacaatagtcagcccaggcaggacaggaaatgaccagacacagaaaatacaaggagaacagatagaagtacatcaagggggatacaaggactgagctgggacacaagcgctgagctgcgctgctgacagtggttctgaagccatccctcatggatcatgtgctgagtcatgatgccctgcacacactgatttaagcggcctcctataattttgtccagtggatgaacaaggtcttgacttactcagtgagagtagtgttggaggggaggggctcacggggaaattggggtgttcactattacaaagtcaataggctggtatttgcatccagatcaatgtatcatgtgaggcaaggccaggaaaggaagggcaagggtggagagcaggaagtaatgggcatgtaggagtgaactttgtgcatgcatgtctgtgggaatataattccactaggatagaccaaatcttgagcttggaagaaagtggaactaatttagcaaatggtaaaatattgacccaaggttaaatattcaaattacaatatgggcaagggacaagaatgaaagagatccaaaaaagcagcagtatggtggcctgaggtgaaagcaattttacatctcttaaattaaatgcctctgatttctagtttcaagcatatactcaacaataatcccctgtgtagattccagaaatgtgtacacacaaaaaaataagtaaaccctatgaagagtacagtagagcaatgtaggagaccatggggttgaagaaggatgccctggctgagtaggtagagatgtgtttgtgaaaacagagccaggctgagtgcagtggctcacgtctgtaatctcagctcattaggaggatggatgggtggatcacaaggtcaggagttcgagaccagccaggccagcatggtgaaacactgtctctactgaaaaaatataaaatattagcccggcatggtggtgcatgtctgtaatcccagctactcagaaggctgaggtaggagattgcttgaacctgggaggtggaggttgcagtgagctgagattgcaccactgcactccagcctgtgtgacagagcaatactccatctaaaaaaaaaaagaagaaactataactttaatagaaatgtggtttcaccatgttggccaggctggtcttgaactcctgacctcaggtgattcacccacctcagccttccaaagtgctgggattacaggcgtgtgccactacacccagcctggcagcattatttataatagtaaagagaagaaaccaacccagatgtccatcaacagataaatatatgaacaaaatgtggtatacacatacaatggaatattattcagccttaaaaacaaacttggatgggtccaggggctgtggctcatgcctgtaatcccagcacattgggaggccgaggtgggtggatcacgtaaggtgaggagtgagagacgagtctgaccaacatagagaaaccccgtctctactgaaaatacaaaattagctgggtgtggtggcacatgcctgtaatcccagctacccaggaggctgaggcaggagaattgcttgaacctgggaggcagaggttgcggtgagccaagatcataccattgctctccagcctgggtaacaagagcgaagatccatctcaaacaaaaaaacaaaacaaaaaaacaaccaaaaaaaaaaaaaaagccatgcatggggcaaaatcacaaaagagaacacaaaaccaggaagggccaagatagacaagagcagactcctcatgtctgggggacatcattttcctcacccacagcttccaggttcctgtagttctccaacatcacttccctgtacaaagccctctgcgaagggttcaggcatttccactctgccaatgagaattctatagccacatccctgaaagtcaagcgtccctaaaatgaaacacacatttccacaaaacattatggaggattgagttatcaccttcatgggaaatgagaaaagagaaaataagtatttgatcaaagactgtgttctgacaaaatgttaaggtattttgaatattttttccctatagttgcattttattgtacttttctttgaaagattttaagatgccataagtcactatggaagtctcaatttcatagacaacataaaaagtataaaaataaaaaggaaacacagggccaggcatggtggttcacacctgtaatcctaacacttcgggaggccaaggcgggcagattatttgatgtcaagagttcgagaccaccctggccaacatggtgaaaacctgtctctactaaaaatataaaaatttgtcaggcatggtggcaggcacctgtaatcccagctacacaggaggctgaggcaggagaatcacttgaacccaggagatggaggctacagtgagccaagatcgcaccactgcactccatcctgggcaacagactgacactccatctcaaaaaacaaaacaaaacaaaacaaaaaaacaatgccgggcagtgactgtcacctgtaatcccagcactttgggagaccaagacgggcagataatgtggtcaagagattgagaccatcctggtcaacatggcaaaaccatgtctctactaaaaatacaaaaattagctgggtgtcgtggtgcaggcctgtactcccagctactcaagaggctgaggcaggaggatcgcatgaatccgagaggtggaggttacagtgagccaagatcgcaccactgcactttagcctggcaacagagcaagactccatctcaaaaacaaacaaacaaacaaacaaacacagggttttttctacagacatgtcagatattatgttcaacataccaggtgatattaagtctctagatgagctaagatacaagtggtgtttcagagaggacaaaatccaacggctttgaatgaaaagtctgaatctaaaaactgtcatgactgcgcaggcacagtggctcatgcctgtaattccagtactttgagaggtcgaggcaggtggatcacgaggtcaggagtttgagaccagcttgggaacatgctgaaaccccttctctactaaaaatacaaaaattagctgggagtgatggtgggtgcctgtaatccccaatactcgggaggctgaggctggagaattgcttgaaactgggaggtggaggatgcagtgtgccaatatcatgccactgtacttcagcctgggtgacagagcaatactctgactccaaaaaaaaaaaccaaaaaccaaaaactgttatgatgacagcaatagccatgactaacatttttgaatgcttcccactgttctaagtgcttcccatgtcttaagccataaaataacatactgtcccatgaagaaaggtctgtacttggagacaagtgcatcacacatactaggaaaattaccacaaatcaaatagctaaaaatgtcaacacaagcactgaatccagatgtctgggattcacatttgaatataaacgctgaagtaacagatacagctttaaactaaactgacatgggtttatctagtggagagaatgtgacaaaggtccaagggtaagaacacggagcatcctacaaggtcgctgaatggacacacacaggcatacatataatccttcccaatacttcttactttttttttttttgagatggagtctcactctattgcacaggctagagtgcagtggcagaatctcagctcactgcaacctcggccacccaggttcaagcaattctcttgcctcagcctccccaggagctgggatttgaggcacctgccactgcgtccatctaatttttgtatatttagcagagacagggtttcaccatcttagccaggctggtctcgaactcctgacatcgtgatctacctgcctcagccttccaaatgaaaaatagttaaaatcattacaattattataaaaaataaaacttattgcaaatgaaaaatacttaaaatcattacaattattataaaaaataacttattgcaaatgttgtgttttctacataaaccatgggcttatccacccatgtattcatgcacacacatcacatcacggcgttacccacgtggtggcccacctctaatccaagctactggagaggctgaggcaacagaatcactgtaatctgggagtcagaggctacagtgaaacaaaatcaccccactgcactcctgcctggacaacagagactcaactcaaaacaaattaaaaaataaagtaaaatcaatgatgtaagaaagcatcctgtaccactgatgcctatctccactttccactccatcccaagtcattaaaagtgcagagtttggctaagcgtggtggctcaggcctgtaatcccagcactatgggaggctgaggtggatgaatcacaaggtcaggagttcgaccagcctgaccaatacggtgaaaccccatctctactaaaaatacaaaaaattaaacaggcgaggcagcaaatgcctgtaatcccagatactcgggaggctgaggcaaaagaattgcttgaagccagaaggcagaggggcagggagctgagatcccaccactgcaatccaacctgggcaacggagcgagactccatctctaaaaagtaaagagtccagctgggctggctgtctcccatctggaatgccagcaatttgggaggccaaggtgggaggatcactggaggccaggatatcaaggctatagtgagctatgattgcaccactgcactccagcctggacaacaaaataaaaatacgatataaaaaataaggccggacacagtggtgcacacctttaatcccagcactttgggagtccaagacaggcagatcatgaggtcaggagttcgagaccagcctaaccaacatggtgaaaccccgtctcaaataaaaatacaaaaattagctgggtgtggtggtgcatcctgaagtcccagcaactcaggaggctgaggcagaagaattgcttgaaactgggagatggaggttgcagtgagccgagatcattccattgcactccacctttggggactgagcgagactccatcttaaaataagtaaataaatagatagagagatacatatatacatacatacggtgacccatgcctatcactcaggctctttgggaggctaaagcagggattagttgagctcaggagtttgaggctgctgtaaactctgaattgtaccattgtactccagaactaagccacagagcgacaccttctccctctctctctcttttcttttgagacagagtctcactctgtctcccaggctggagtgcagtggcataatttcggcatacagtaacctccacgtcctgggtttaagtgattatcctgcctcagcctcctgagtagatgagattacaggcatgcaccaccaccccaagctaatttttgtacttttagtagaggtggggtttcaccatgttggccaggctggtctcgaactcttgacctcaagtggtcttcctgccttggcctcacaaattgctggtattacaggtgtgagcacctgaaccaacatcctgtctcttaaaaaaaaaaaaagtttggaatcacagacatcttgatctactagtgtggcttcaaatgcattaccaaatcagatacaaaatacctccccttatttgtctccttttccagaatttactagatatctgtgtacactaacatatgtatttcatatgtagtttctctgatctggtccacaaagagctgacatccagatgtggcccctgaacaatccagcctgcccagcagcactgacatcaatgggcccacaccccatgtttatccatgtctaggtgtgagcccttcccaggaccatgcccagtggagcttcttcccaagttcacatcactgggtcacaggagatggaatctcggagcagctgagaggaactaagggcaggcatggctgagtgtgagtgaacgtgtcaggcaaaattcttcaaactcagaaaagactggctgctacaatacctggcatttcagaaaggaaagagacagattaatccacagaggaatatcacttcacctgaggaagagccatgcctggctcctttcctttcctcttctgagctgcttcttcacataacatgagtctttaggaatcaatcctgtatgtgaaaaaaaatgagacttcttgttagaaatgactcactcccatcctgtgacaaaaccacatgaacaggggagacctcacccagcagaaagaagtcccccaccgcccactgcaccagagatcatgcagagataagaaagtcccacaggacgacctataagtgtgtttgaccccggtcttcagatctcactcccctcctggagaagcccccacacactaggcagcagtggggagctgggctggactgatctccccttcagggcacaaacccatccttcatcaatccccatccagaggacagcccctcacctctctgtggatcacaggctgagctcagccctcagaaatggaggacaaagatgctcaatgctgcacacagatgacaagcacctgcgccactgcaggtattactgagggtgggttccatcccatcagaataagaatccctgctaaagcagcacaaaagctctatttgaaaaatgcctctagactctaatgtgaagccagggttgagctccactcagagggggcgagcccagcacagccccacgttctggctctgccctccccttggggccttgttctcaccagcatccagagagtggatgacaaaggcacaaaaataatcacacagaacaggcaacgtggaccagaggtggggtgaatgatgggctgtgtgaaaggaaataaatcttcgagccccaactcactaagcaaaagggagaagtcaagctgggaactgcttagtgagccagactccccttctattcaaagtcacccctctgctccctgacatagatgcatgtctgagtgcctccttcgaaagactaatcagaaactcaaaagaaggacccagcacagtggctcaggactgtaatcccagcactgtgggattacacaggtagatcacttggggtcaagaggtggacaccagccagccaacatggtgaaaccacatgtctactaaaaatacaaaactgatccgggcatctacttgggaagctcaggcaggagaatcacttgaacccaggaggcagaggttgcagtgagccaagactgtgccactgcactccagcctgggtgacaaaaggagacttcatctcaaaaaaaaggaaactcaaaagattgcaaccgtttgtgccacatttctctgtgacctggaagcccactccgtgcttcaagtcttcctgcctttgtttaaagttctcccaccttcccagaccaaatcaatgtacttcttacatatattgattgatgtctcatgtctccataaaatgtataaaattaaactctgcgccgaccaccctgggcaaaataaactttctaaattaactgagatctctgtaagattttctggtttcacagctgcagtgtcaaatgagggctgtgggagatcacaaaggaaacccggagaagatgatatcagaacaaggacctaggaaagaaaggctgcttgtcacttgcagctgaggggaagagagtcctagagagagggacagctcaagtgagggccctgagacaggagcaacctcagccccaggaagaggaaagcgaccagtggggctggaacagtggaagagaggagggcacaggtaggagatgaggtcagagaggtcctgggggcacagacccataggaacatgtcttcaaacatgtttctcccacaaccttaaagaattttgaaagtcgactgtgatcccagctactcgggagtctgaggaaggagaatcccttgatcccaggagtcagaggttgcagtgagctgatatcatggcattgcactccagcctcagccacaagagtgaaaattcctctcaaaaaaacaaacaaacaaacaaaaattggaagtgatgtatcttctcactcttttcacgtatacatctaagtttctctttatattataaattacaacacttacaaataaagtaatttatttcacaaatttaaaatacatgctgtcaagttcggccgtttccggaagtacgtagtcaccctcatctgagatgtgcagactgcaaggaaatgtgtttgggggtttagaaagccactcgtggacacctgaaggtggggatgcctgtttgatgacccaggagacagctgaggagacaactggacacaggattgtagagctcaggggcgaggcctgcaggggacatggagtcatgtaggtgggttaaagctgtgagatgataaggttcaaggtgacttgagtctaattaccccgtttttgttcatcttgtgcttctttttttttttttttaatatttggagaactggaattcatttaaaattcgagttaaaactgagcactaccctctcccagaagaaaagtcacacactgtattttgtcagtcatttcaggggtcagtgtcactgactgagcttttccggtcttattcctcacctctatgttacaggtgggctcactgaggctcacagtgggagacatttcaccaagttattctgagatgttctgaggtgaggaggaaggacgtgtggctgattcccatgtgattgcctggaaggcccaataggctgccttggtcttcctcctctagaaaattccaagaccagccaggattggtggctcacccttgtaatcccagcactttgggtagttgaggcaggccgatcactggagccgagaagtttgagaccaacatgggcaacatataaaccccatctctaccaaaaatacaaaaaattagccaggcatcatggcatgcatctgcggtcccagctacctgggaggctgacgcaagatcacttgagcctgggaggcagaggttgcagtgatccaagattgttccactgcattccagcctaggtgatagggtgacactctatcttaaaaaaaaaaaaaacagcggtcaggcaaggtggctcacacctgtaatctcaacactttgggaggccgaagtgggtggatcacaaggccaggagctcgagaccaacctggccaatatggcaacatcccatctctactaaaaatacacaaattagccaggcgtaggggtgtatgcctgtaatcccagctattcaggatgctgaggcaggagaatcgcttgaccccgggaggcggagtttgcagtgagacgagatcgtgccactgcactccagcctgggtgacagagagtctcaataaataaatatatatatctaaacattagccaggcctcgtggggcgtgcctgtggtcccagctactccggaggctgaggtgggaaaatcacttgagcccaggaggttgccgctgcactgagctgtgatcctgccactgcactccagcctggacagcagtaagagtgtctcaaaaaaataaaaattaaaggctggacgcagcagctcatgcctgtaatcacagcaccttgggaagctgaggcgggaggatcacctgaggtcaggagttcaagaccagcctgaccaagatggagaaaccccgtttctactgaaaatacaaaattagccggccatggtggtgcgtgcctgtaatcataactactcaggaggctgaggcaggagaatcacttgaaccccagaggcgaagtttgtgatgagccaacatcacgccattgcacttcagcctgggcaacaagagcaaaactgcatccaaaaaaaaaaaaccgacaacagcaaaaataagtaaatttaaagtaaaattaaaaaataacaactaatgaggcccagtgtgatggctcacgcctgtaatcccaacacttcgggaggccgaggcgggtggattacgaggtcatgaattcaagaccagcctggccaagatggtgaaaccctgtctctactaaaaatacaaaaatcgacaggacaggtgtggtggcggctggctgtaatcccagctgctcgggaggctgagacagagcactgcttgaacccgagagccggaggttgcagtgagtaaagatcgctccactgcactccagcctgcatgacagagaaagactccatctcaaaaataaaaaataaataaataaataatcacacaaaaaaccaactaaactaatgaagagaggaactagaaaaaaaaattacaaaaagagaacaaaagcacttttaatattcctttcatcacgttccatatagtaacagagactcagtcacttcttactctacttctctccctcactccccaccccatccatgaaaagggaagagggtgatccacaaggaatgagtcaagtcactgtcctctggctgaagaggggttgcagagggaagctgcctctgacgccatcattataaaatgcaccacacttagacacaggagtttggcaactctcattctcatctgtataatttaaactaattttaaatttgttacattataaacagagaaaacaacatgtcatcacttcatcatcacatccaatcaactcaccactcatctgcacccagggtcccccttcgtcttcattacttttcccctccatcattcctttttttgtttgtttgttttgagaccgagtctcgctctgtcgcccaggctggagggcagtggcgcgatctcggctcactgcaagctccgcctcccgggttcatgtcattctcctgcctcagcctccggagcagccgggactacaggcgcccgccaccacgcccggctaatttttagttttcttagtagagacagggtttcaccgtgttagccaggacggtctcaatctcctgacctagtgatccgcccgcctcggcctcccaaagtgctgggattacaagcgtgagccactgcacctggcctcccttcggcattctatacatagctctttctcaccttctctctccatctgtttcttttctgcatttccccctggacttctgctcattttatgcccctctcctgttttgctccattcttttttgttttttgtttgtttgtttgttttttagacggagtttcgctcttgttgcccacgctgaagtccaatggtgcgatctcagctcaccacaacctctgcctcccgggttcaagtgattcttctgcctcagcctcctaatccaaaattagcagggcgtggtggcgcatgccagtaatcccagctactcgggggaagtatcacaagagaatcgcttcaaccctaaaggcagagatagtcattagccaagatcgtgccagtgcactccagcttgggcaaaaagagcaaaactccacctcaaaaaaaaataataataataattagtaggtaggcccggcatggcggctcatccctgtaatcccagtactttgcaaggccaagacaggaggaaactttgagcccaggatcttgagaccagcctgggaaacatactgaaaccctgtttctacaaaaaaacaaacaaacaaagaaaaaaaacaactagctgggcttggtgtctcacacctgtggtctcagctactagagagactgagggaggaggatcgcttgagcctaggaggtcgaggctgcagttagagtagagaacgctattgtaatccagcctgggtgacagagccagaccctgtctcaaaatataaactaattaataaattaaaagtattatgtaataagagaaagtgattttttttcccccacatcactgtcccacttcctaccccaccctgggaaaagggaagagactgactcacaactgaataactgggattccaagtagaagctaacctctgataccaaaatttatagaatgtacatgtctcatagacaggagttttaaaattctaaatctcatctgtataatttaaacaaggtattagatgatatacacagaagtcaacatgtcacaactaatcatatccaatgaactcacccacttatctgtacccaaagtcccccaccctttttttcttttgagacagggtcttgctcttttgaccaggctggagtacagtggcatgatctctgctcacagcagcctggagctcctgggctcaagtgatcctcctgcttcggcctagagaagctgaaactgcaggtgcacactatcacacccggttaaattttttttttccttttttgacagagatggggggagcctcactattttgcccaggctggtcttgaactcctagactcaagcaatccctttgcctcagtctcctaaagtgctgagattacaggcatgagccactgcgcccagcccctctttcttcattactgtgcttccctccctaattctgtgcatatctctcattctccccttctctctctagctcttgttttcttttctttttccctgggattgtgctcctcattttgtacccctctcctctcctgctgtttatccccttcttccctctattacttctcttccacctcttctgctccattctcacagcttatttaacctcttttttttttttcctttttgagatggagtttcactcttgttgtgcaggctggagtgcaccggtgcgatcttggctctcaccgcaacctctgcctcccaggttcaaaggtttctcctgcctcagcctccctagtagctgggattacaggcatgtgcaaccgctcccagctaattttatatttttaatagagacggggtttctccctgttgatcaggctggtctcgaactccggacctcaggtgatccacccgcctcagcctcccaaaatgctgggattacaggcatgacccacagcgcccggtccttatttaacctcttgttgttctttctccccaatctttcaatcttcctcaatgtctatatattacagcctcttctcttatctctccgtctcctctgctctccctattaaattctctcttccctgttatacccctctgtccccactctccagcacctcagatccccaggtgtcctccctgctgtggttctccatctgttcttgccaccagcaccactctgctctgtctgccctggctccaaatccctcctcctctccctcactctggtgagcctccctctttgctgcccctctccctaccttgctgtccttcatctttctgtacatctagcttttctctacatttctccagttgcttttctcctcctgctttcttagttttttttctttcacttttgctgtctcttggcaaattcctaacccatcctctactttgccatctgttatgggcctttctcattcttcttttctctgtctctggttttctactgctctctcagtccctctctctatctcctgatccctttggcccaggcgggtttggagtaatcacaggcgggtttggagtaagacgcctgcatcccgtagaagcgcattttccagggggtggagctggacaggaaagaacacctggtatcataggacaagcccctgcgacccaccccaaccctggctcaggggaagcgaagacttggggagcagcagggcccggcaccaggagggacgtggtgggcgacggcaccctaagacaaaggtgggacctgcaggatcccaggaccaggcagaggacgcagcctccccggggctggggccggggcgccgcgctccaggtgccaactggggcgaggctgggaggcgcccagggctggaatccacctcgcgggtgaggactttaaaaagcacggggcgggaatagtcagaaaaatgttttgagcaggaaaaatacgcgataggaagtgtatacattgccctatagcagaaagaccggggacgggaccagcctccgagcgacttcaaacccaaaagcaagcaacttccagactcttaccgggacgtctcaatttgctctgggtgaagggaagacaggcgagaatttccaggtccgtggggatcccacgtcccaggggcagaagcgccggggacctgggaagtgcagacttaatccaaggcagagcaaaactcacgcgccgtggtaggaccttcactccacgcgatccgcttccgggtttgtgcgcgcccaggactgaagccaggccggggcaggttggctggacctgggcggggtagaggcggggccccaggcggagagaccttgccctttagaaccggcagagggagggcccggggcgggacctgtgcttctcagcctcgcactcagcgcctctgtttttcgagtttttggaggcgacagcggccaggaaggctgaggcatgattcaaaagccctggaattatctggaacgggaatgcaaactagaatgtgaaatgcaaagccctgccagggcggaacatacgatttcatgctgatggcccacagaacagaacagaaatcctctccctttctattctccattcactcaggagggagggtccaccccgtgctcagcttcaaagtgttccctagggcctccgcctgggatgcgggacggagagctcaggccagggaggagtgaggtcaccacctgctgcctaaacacagcagggatgcgggcacgaggcggaagcctgaggtcccagctactcaggaagcagcggcgggagaatccctgaacctgggggtccaggccatcctgggcgacaaagtaacaccccctaactgcagggtcctcttcctgatctctctctcgctcttttactttttttttttttttttttttttgagacggagtctcgctgtgtcgcccaggctggagtgcagtggcacgattttggctcactgcaagctccgcctcccgggttcacgcccttctcctgcctcagcctttcgagtaactggaactacaggagcccgcctaacccaaacaaaaacaagaccgggcgcgctggctcacacctgtaatctcagcactttgggaggctgaggcgggcagatcatgaggtcaggagatcgagaccatcctggctaacacagtgaaaccccatctctactaaaaaatacaaaaaaattagccaagcgtggtggtgggtgcctgtaatcccagctactagggaggctgagacaggagaatggagtgaacccgggaggcggagcgtgcagtgagccaagatcgtgccactgcactccagcctgggcgacagagcgaggctacgtctcaaaaaaaaaaaagaaaaagaaaaagaaaaagaaatatctcccctagtttgtctccttttccagaatttaccagataccagtacacagataccagtgcatacattaatgtatgactttcatacatagattctctgatctgatccacaaagagctaaatgtgcatccagatgtggcccctgaacaatccctgctgcccaatatcactgacaccttggggtccacaccccatctccatccatctctggtgtgagcccttcccaggaccatgcccagtgcagcctcttcccaagctcatgtcactaggttatagaagatggaatttaagtgaagatgacaaggactgagaaaaggcatgggttagtgtgagcaaacgtgtgaggcaggatgcttcagactcacagaagactggctactacaatacctggcatttcagaaaggaaagagacagaagaatccaccgaggaatattactccacctgaggaagagccatccctggctccttttctttgctcctcttggtgtcttcctcacgtaacatgagtctttggaaaatcaatcctgtatgtaaaaaaaaatacgagatttaatttttagaaatcactccctcctttcctgtgacaaaacacacacacaggggagacctcaccagggataaagatggttctctgctgcccactgcaccagagattatgtggagataagaaggtgccacaggaagacctacaagggcaattttgacctgttttgaggtcttgctccctcctgcaaaagtccacacacacgctgcagcaggacacagatcttcagggcacagatctggccctaaccaaaccccatgcagagcacagccccctcacctccctgtggatcacaggctgatctcagctctcaacatggaggaaactgccttgatgttcaatgctggagacagatgagaatcacctgcaccattgtaggtattattgagggtgggtcccatactgtgataatagcaatctctgataaaacagcatagaagctatatttgcaaaatgcctgaaaaccctaatgtgaagccaagtttgagctccactcagggcaccagccccgcagagccccaccttctggctctgctctccgcttggggacttgttcccaccaggatccagtgaacagcgaaggagcaaaaaggatcacacagaacaggcaacatgggccagagatgggggtgaaggtggggctgtcatgtcaaatgggggactgtgggagaacacaaaagttttcatagaaaaagtgatgtcagaacaaagacttagggaagaaaggctgcttgtcacttgcagctgagtggccagagagtcctaggcagagggacagcccaggtgaaggccctgagaaaggagcaacctgagtcccagaaaaagaaaagaagcctgcatggttacagtagaggtagggaggaggacagaggcaggagttgatgtcacagagctcctgggactcagatatctagggatgaggtcttgaaacatttttctctcacatctcaactcaaaagaattttggaaatgtattttctcactcattttatgtatacatgtaactttctcttctatactttgtctctgtgtctctttcttttcaaagtgtctcgttccacctgacgagaaatgcccacaggtgtggaggggcaacccacctcttcaccaatgcaatccatcctgggcaatggagcgagactctatcacaaaaaagtacagagtccagccagggaggctgtctcacacctggaatgccagcaatttgggaggccaacatgggaggatcccttgaggccaggagatcaaggctatggtgaggtatgattgcagcactgtactccagcctggacaacaaaattaaaaaaaatatgaaaaatacggccgtacactttaatgagcattcgtgtgaagagaccaccaaacagcctttgtttgagcaacatggctgtttatttcacctgggtgcaggcgggctgagtccaaaaagagagtcagtgaagggagataggggtggggccgttttataagatttgggtaggtaaaggaaaactacagtcaaagggggtttgttccctggtgggtaggagtgggggtcacaaggtgctcagtgggggagctttttgagccaggatgagccaggagaaggaatttcacaaggtaatgtcatcacttaaggcaaggaccggccatttacacttcttttgtggtggaatgtcatcagttaaggtggggcagggcatattcacttcttttgtgattctttagttacttcaggccatctgggcgtatacgtgcaagtcacaggggatgcgatggcctggcctgggctcagaggcctgacatacatgtgccccacgcctttaattccagcactttaggaggccaagaagggcagatcatgaggtcaggagtttgagaacagcctggccaacatggtgaaaccctatctctactaaaaatacaaaaattttgcaggtgtggtggtgcacacctttagccccagctacttggatggctgaggcagaagaatcgcttgaacccaggaggcagaggttgcagtgagttgagatcgcatcactgcacttcagcttgggcaacagagcgagactccatttcaaaataaataaataaataaataaaacaattacccacatgtggtgacccatgcctatctttcaagctctttgggagtctaaagtcggaattacttgaacctaggagtttcaggctgctgtaaactctaaattgtgcctttgtactctaaaactaagccacagagcaacattatctctctctctctccttttttttttttttttttttttgagatggagtcttgctctgttgcccagcctggagtgcagtggcacaatctcggcttactgtaacctcgacttcccggattcaagtgactctcctgcctcagcctcctgagtagctgagattacaggcatgagccatcactcccaactcatatttttagtagagatgaggtttcaccatgtgggacaggctggtctcaaacccctggcctcaagtgatccacccaccttggactcccaaaatgctgggattacaagtgtgagccaccacacccagaccaacatgctgtctctttaaaaaaaaaagtttgaagtcagagacatgttgatctactagtgtgacttcaaatgcactaccaaatcagatacaaactatctccccttataggtctccttttccagaatttaccagatatctgtgcatattaaagtatatgtttcatatgtggtttctctgatctcatccacaaagagctgacatccagacatggcccctgaacaatgcaggctgtgcagcagcactgacaccacggggcccacaccccatgtccattgatgtctgggtgtgagcccttcccaggaccatgcccagtggagcctcttcccaagttcatgtcactggctcacaggagatggaatctcagagcagctgagaggaactgagggcaggcatgggtgagtgcaagtgaatgtgtcagacaagatgcttcagactcagaaaagactggctgctacaatacctggcatttcagaaatgaaagagacagattaatccaaagaggaatatcacttcacctgaggaagagccatgcctggctcctttcctttcctcttctgagtggcttcctcatgcaacatgagtccttagaaatcaatcctgaatgtgaaaaaaaaaagacttcatgtcagaaatgactcactcccttcctgtgacaaaaacacacaaacaagggagacgtcaccctctggaaagatggtcctttgctgcccactgcaccagagatcatgcagagataagaaagtcccacaggaagacctacaagtgtatgtttgaccctggtcttcagatctcgcccccctcctggaggagcctcccccacgaggcagcagtggggagctgggctggactgatctccccttcagggcacagacccatccctgatcaaaccccatccagaggacagcccctcacctctctgtggatcacaggctgagctcagccctcagaaatggaggactcagagcttcgatgctcaatgctgcacacagatgacaagcacctgcgccactgcaggtattactgagggtgggttccatcccgtcagaataagaatccctgctaaagcggcacaaaagctctatttgaaaaatgcctctagactctaatgtgaagccagggttgagctccactcagagggcgtgagcccagcacagccccacgttcaggctctgccctccccttggggccttcttctcaccaggatccagacagtggatggcaaaggagcaaaaataatcacacagaacaggcaatgtggaccagaggtagggtgagcgttgggctgtgtgaaaggaaataaatctttgagccccaaatcactaagcaaaaaggaaaagtcaagctgggaactgcttagggaaccagactccccttctattcaaagtcacccctctgctccctgacatagatgcatgtctgagtgcctcatccaaaaggctaatcagaaactcaaaagaaggacccagcacagtggttcatgcctgtaatcccagcactgtgggaggctgatgcagtgagctgagatcgtgccactgcactccagcctgggcgacaaaacgagacttcatctcaaaaaatacaaaaaagaaactcaaaagattgcaaccatttgtgcctcatttatctatgacctggaagcaccctcgctgcttcaagtccttctggctttgtttaaagttgtcccgcctttccagaacaaaccaatgtatgtgagccaccatgcccggctcaatcctctttttatttatttatttatttattttatttttgagacggagtttcactctgtcgcccaggctggagtgcagtgttaggatctcggctcactgcaagctccgcctcccagcttcatgccattctcctgcctcagcctcccgagtagctgggactacaggtgcccaccgccacgcccaactaattttttttttgtattgttagtagagacagggtttcaccgtgtttgccaggatggtctcgatctcctgacctcgtgatccacccacctcggcctcccaaagtgctgggattacaggcgtgagccactgcacctggcccggcccaatcctcttaaacactttaacgtcaattaatgctcgaactcaatgttaaatcaactcatcctcaggtcaatgctgagttgactgtaatgtacgccttgatggtttgctatactcagtgcattttgaactattacctcaaaatgtacttcttacgtatactgattgatgtctcacgtctccatgtaatgtataaaattaagctgtgccccgtccaccttgggcacatgtcatcaggacttcctgaggctgtgtcacagatgcgtcctcaaccttcacaaaatacactttctaaattaactgagatctgtctgagattttctcagttcaaagctgcaatgtcaaatgggacagaaaggctgcttatcacttgcagctgaggggctagagagtcccaggcagagggacagctcaagtgaaggccctgggacaggagcaacatcaccctcccaacaaaggaaagcagcccgtgtggctggagcagtggaagagagaagggcacaggtaggagatgaggtcagagaggtcctggggacagagatccatagggttaaggacttcaaacatttttctcccacaacccaaaagcattttgaaagtccactgtgatcccagctactcggggggcagaggtaggagcatcgcttgaacccggaagaaggaggttgcagtgaatcaagattgagccactgaactccagcctgggtgagaagagccaaactctgccacacacacacacacacacacacacacacacacacacacacacacacacacacaaaagtgatgtatcttctcagtcatttcatgtatacgtgtaactttctctttatattataaattacaacatttacaaataaaggaatttatctcccatatttcaaaaacatgctgtcaagtttggctaagtccccagaagtacacagtcaccctcatctgagacgtgtaggactgcaagggaatgtgtttgggggtttaggaagtcacttatggacacgtgaaggtggagatgcctgtttgatgtcccagcagagagctgaggagacaactggacacaggattgtagagctcagtggagaggcctgcaggggacatgggtaggtgggttaaagccctgagatgagataaggaaaagcagtgggtgtggacagagacaagaataagttcaagatgatttgagtctaatcccgtttttccattccggtatttgtgggtttttttacatttttggaggacaggaatccatttaaaattcaaatcacacctgagcatcaccctctcctacaggaaaagccacacacttatttggcaaagtatttcaggggtcagcgtcactctgactgagcttttctggtcttattcctcacctgtacattactggttgagtcactgttgttacgagcaggagacacttcaccaagttatcctgagaagctccgagttgagtcagaaggaggtgtggctgattcccacgtgatggtctggaagcgccaataggctgtgttggtcttccttctctagaaaattccaggatgggccgggcatggcggctcaccctgtaatcccagcactttgggaggctgaagtgggtagaccattgagcccaggaatttgaaaccaacgtgggagacgtggtgaaaccgcgtctctaccaaaagtataaaaaattagccaggtctggtggtgtgcatctgtggtctcagctatttgggaggcggactggggtggatcactgggcctgggagatggaggttgcagtgagccaagattgtgtccctgcactcaagtatgggtgacagagtgacactcttgtctcaaaaaaggaagaaaaaagtttcaggaccattctatatacctgagcaaatgaaatgtctctttcaatgtctaaggttttgatggcatgaatcctaaacataattattttctgagaaaaatgattgtaatacgttcaaaataaacacaattttgaacacatagctataagtgtttaaaacattgaaaaagaagcagcggtacaaatgagatctgagcaaatgttttcgtcatgaacatatgggctctgctggaacaaggttccaggtcaatccagcccatccttcaacatctgcaaagaatattatggaccagaggaacttgaagggaacatttacttaaaagctcacagctcactatttagtcagatgacataaagaaaatggaataataggctacatgaactaaattttgatgttagcataaagaaaaagttccttgatatctttatcaagtacacattgaaacaagctaaaatcatttatcaggtaccagaaaatgtttccaatatatgacacagactagaaagcatgcagtcctcaatgtaaactaaacacaataaatttcagagaaaaacaatttacagtggttaaaaaaatatatatatatataataaaatgtggggtcaaagaaatttttcaatacatatcatagttggaaaacaatgatgtgacttcgtaagattataccaaagcttatttgagaagcagttatttactttatttttattttgttgagatggagtctcaccctgtagcccagctggagtgtaggtgcgccatctcagctcattgcaatgtccgcctcctggattcaagcgattctcctgcctcagcctcctgagtagctgggattacaggcactcgccaccaaaccaagctaatttctatattttagtcaagacgaggattcaccatgttacccaggctgttctcaaataccttgcctctggtgatccgcctgttgtggcctcccaaagtgctgggattacaggtgtgagccacagcacctggcttttttttttttttttaattaagaaacaagccgggcttggtggctcatgactgtaatcccagcactttgggaggccgatgcagctggatcgcctcagccctggagttcgagaccagcttgggcaacatggtgaaagcccatctctactaggaacacaaaaatttgccgggtgcaatggcgcatggctgtggtcccagtgactttggaggctgaaatgggaggatcccttgaacccaggaggttgaagctgcagtgagctctgatgctgtcactgctttcatgcctgggcaacagaatgagacccatctccaataaaaatgacaaaagaggaaacacatgcgtcctgggtctggggacagggggaatctaaggccaattaacacgaacctcaggaggtcctgacgatgtgtgcccaaggtgttgaggctgcagtttactttcacacattttatggacacgagacagcaatcaatacataaaacatatacattgttccggtctggaaaggtggaataactggaattggggggcttccgggtcacaggtagataacaaatgatcacattctttgagtctttgatcagcctttcactaaatacacaatttatatgtgagagcgggaggaggaatagtcacttacgtcttagactggagtacagtggcatgatcacggctccctgcagcctctacctcccaggctcaagccatcctcccaatgcagtctccacagaagctgaaccagcagacatgtgccaccatgcccagctaatttttgtattttttgtggagacaggggtttcaccattctgtccaggctggtcttgaataccggggctcacatgacccagctgtctcaacctctgaaagtgctggtattacaggcctgagccactgcatctggtctcatcgcaaatttgatatttcttcttgtttcaattttagcagaatttacattgctttgattgagtctcttttcaaactgattttacccttctgagtgcctcaaactagaccctgttcagacatgttataacagatttgtaccattttattttggtgcaaaaaatgtgacatcatgcacaattttctcataacatgtattttttcatgaacttcgtgaagaccccttgtactagcaaactgtattcaagaggatataaaaaggattgtagatatgcaagtgccacttatttctgagatacaaggatggttcaacatattcaagcaaatcaatgtgatataccacttgaacataatgaaagatgaaaaccacatcatctcaatacatgtagaaaaagcatttcacaaaattcaacatcatcatggaaatcctaccaaaaatagttagagaaggaaatttacctcaacagtacaaagacaatccatgaaacgaccacagtggaaataaacaatcagggaaaatggaatgcttttcctgtaggatctcacatgatgcaagaatgctctcaccctttctattcaatcaatgctggctgtcccagccagaacaatgaaatagcaatagaaatcgaactcatccaaatcagaaagaaagaagtcaaattttatttgtttgtagatgacatgatctgtgaagaaaatcacagtcaaccaaaatacaactggaactaataaacatattcagtgtatttgcagaatagaataatagcaccaaaaattagttgaatttccatacattaacattaaataattttaaaataaaattaaaaaccacttccatttgctaaagagcttaaagtaagaaatatttaggaataaacatataaaggtgagaagtttgtaccttgaaatctacaaacattgatcaaaatgattaaaaacatataaatacacatacaatccatactgattggaaaaattagtattgctcaatgattatataaccgaatgtgatttagattcaacacaatactcatagaaatccccataactttttgttaaagaaacaaaaaacaggccagtcacggtggctcacgcccataatctcagcacttcgggaggtagaggtgggtgaatcataagatcagaaaatcgagaccatccaggctaacacagcgaaacccagtctctactaaaaatacaaaaaattatccaggtgtggtggcatgcacctgtagtcccagctagtcaggagactgaggcaggaggatcgcttgaacctgggaggcggaggttgtagtgagtcaagatcatgccactgcactccaacctggatgacagagcaagagactccatctcaaaaacaaaaacaaaaaaaagaaaaaagaaagaaagaatagaaatgaaaacacaggctgggaaaagtggctcccgtctgttggccaggctgttctcaaactcttaacctccagtgacctaccagtcttggcctctcaaagtgctggcattgcaggcgtgagccacagtgcccagcccagtcctcttaacataaacagtttaatgtcaattaatgcttaaactcaatgttaagtcaactcaaactcaggtcagtgctcatttaactgtaatgtcaattaatgcttgatggcttgctatactaatggcatttgaaacaactgtctccaaaaggaattgtctgatggtctgcaaggagtgatctcggactgaagaccttaccacactgatgacatttgtaagatttctgtccagcatggattctctgatgtctattgaggtgtgaatgtgaagtaaacgctttgccacaatcatcacacttgtgagtttctctcctgtatgaatcctcctatgttttgcataggatgaaacttgactgaagaccttgccacaatcatgacatttataaggtttctctccagcatgagttcgatgatgaatagcaatatatgaacgatatctgaaaaatctgtcacatttattacacttgtaagatctctcattatggattctccaatgatttgcaatggttgtagcattactgaaaactttgtgacaatcattatattagtcaagtttccctatactatggattgcttgatggtgaataagtggtgactgcccactaaaggctttgccacactcattgcacttgtaaggtttctctccagtgtgaattctagtatggtgtgccaggtgtgaatcactcccaaaagccttgttacaaaccttacatttgtatgttttttctccagtatgaattctcctgtctttcaagctgtgatttgtgactgacaactttgtcacagtcttcacatttgtaagatttctctgcagtatgaagactatgatgacttgcaaggtgtgactgttgattaaaaactatgccacattcattacacttgtagggtttctctccaatacgaattgccttttgaattacaaggtatgaattttgaccaaaggtgttgccacactcatcacatttgtaaggtttctctccagtttgaattctaatatgttttgccaggtatgaattatattcaaaaatcttgtcataaaccttacatctgtgtggtttctcttcagcatgcattttcttatgtgtttcaaggtttgatttgcaaccgaaaactttgtcacattcttcctatttgtaaagtttctctgcagtatgaattctatgatgacgtgcaagggttgttttttgattaaaaaccttgccacattcattacacttgtaaagtttctctccagtatgaatggctttgtgacttacaagggttgaattgtgatggaaggtgttgccacactcattacacttttaaggtttctctccactatgaagtctatgatggtatacaaggtttgacatctgactgaaggtcttgccacactcattacactttcaaggtttctctccactatgaagtctatgatggtatacaaggtttgacatctgactgaaggtcttgccacactcattacacttgtaaggtttctctccagtatgaactctctgatgctgtgcaaggtgtgcttgttgattaaaaaccttgccacattcattacacttgtaaggtttctctccactatgaagcctatgatggtatacgagggatgacatctgactgaaggtcttgccacactcattacacttgtaaggtttctctccagtatgaagcctacgatggattataagcgatgatgtctgacggaaggtcttgccacactcattacacttgtaaggtttctctccagtatgaactctctgatgttgtgccaggtgtgaatccctccggaaagccttgtcacaaaccttacatttgtacggtttctctccagtatgaatcctcctatgtctttccatgtgtgatttgcgactgaaaactttctcacattcttcacatttgtacggtttctctgcagtatgaagtttatgatgacatgcaaggtttgcttttgtactaaaaaccttgccacattcattacacatgtatggtttctctccagtatgaactctctgatgttctgtaaggcatgaatcactccggaaagccttgtcacaaaccttacatttgtatggtttctctccagtatgaatcctcctatgtctttcaaggtgtgatttgcacctgaaaactttgtcacattcttcacatttgtatggtttctctgcagtatgaagtctatgatggcgtgcaagagttgattgttgattaaaaaccttgccacattcattacacttgtaaggcttctctccagtgtgaattatactatgttttgccaggtatgaattatatgcaaaagccttgtcacaaaccttacatttgtatggtttctctccagtatgaatcctcttatgtctttcaagatgtgatttgcgactgaaaactttttcacattcttcacattcataaggtttctctccagtatgaagcctacgatggcgtgcaagggttgacagtcgattaaaaaccttgccacattcattacacttgtaaggtttctctccagtgtgaattatagtatgttttgctaggtatgaattacatgtgaaagctttgtcacaaaccttacatttgtatggtttccctccagtataaattatcttatgtgtttcaaggtgtgatttgcgactgaaaactttgtcacattcttcacattcataaggtttgtctgcagtatgaagcgccttgtgaaggaagagggatgtattgtgaccaaagatcttgccacactcattacacttgtaaggtttctcatcaatgtgagatctacgatggcatgcaaggtatcgcttctgattaaataccttgccatatacatcacatttacattgtttctcttctaagtgggttatctgatgtttttttaaaagtgagctacaattaaaggatttgccactctcaatacattggaaagatttttctctcatgtgtacattccgtttttgtgtgagtaatgaagaatggagggaattatttccatacttattagaaatatgggttttgggcctacaacaaattctttgggatgttgaaactgaggaagcattgttgatagacttctcaacttgattaccaattttcccttcaggctgaaatatgtgcagttcaggcagatgcgaatgaaagcttaatccaagctgatctttaatatgcttgtttccagcatgcctttgatcatgttggcctgtactaccagtcaactctttgatttctgtcatgggtgctgcatggtcatttgtttcatcttctttccactgaaactggaagccatgaatgtctttctcaattttctggaagcaaaaatctccaatgtgatgacttgcttgtctttgcaatgtccctgtgtggaacgcttctgtattgccttgccctgttgagaagaatgtcttcatcatgcatttggaagagatatctacaaaatataaacaccaataggtttccaatgaagtacagatggtgtataatactgaaatgtgtaaatatgacacaaaaaacaatacttattttaaacttcccaaacatgatcttcaaagtttaagaacacaaaaggagtaagattctttaataaataaagggcgattatatgtctttcaaatcaattccatgaaagtctatttcctatatcatgacaaaacactgacagggcacaaacatgtgtgagcctaaagtaaggagtgtttttccactgtgaccctaaagtgtatcacactttgcaaaaaacacatcactatcacatcaaaaaaagaaaaatatatattcttcatatttacagcgtatttagtgtatacaaataaatgctaaagaaccacacaatatactatattggtaaataatccaaaacaagctgttgtaaggataaccaaaatcaatggaaattctgtattgtcaaacaatcatagcactgacaagataacaaaagattataaaaattagccaggtatggtggcccgtgcctgtactcacagctactctgaaggctgtgtcacaagaattgcgttaagccaaaggcaaaggttgctgtaagccaatattacaccactgcactccagcccaggtgacaaaatgagcctccatctcaaaaaaacaaaaaaacaaacaacaaaaaaaggcagggcatggtggctcatgcctgtaatcccagtacttctagagggcaaggcaggcagatcacctcacgtcaggagtttgaccagcctggccaatgtggcaaaaccccatctgtactgaaaatacaaaaagtagctggcatggtcacaggtgcctgtaatcccagctacttgggaggctgagtcaggataatcgcttgaacttgggaggcaaagattgtggtgagttgagatcgcaccactgcactccaccctggatgacagagtgagactccatctcaaaaaaaggaaaatgttaataccatatttttccaaataactgttacaaaattacctatatccatgtggaacaggcacgttgtgactttttttttttttttttgcgacgaaatcttgctctgtcgcccaggctggagtgcagtggcatgatctcggctcactgcaagctccacctcccgggttcacgccattctcctgcctcagcctccccagcagcttggactacaggcacacaccgccatgtccagctaacttttttgtatttttagtagagacagggtttcactgtgttagccaggatggtctcgatctcctgaccttgtgatccccttgcctcagcctcccaaagtgctgggattataggcatgagccaccgcacacggccgacttttaaaaaaaattttatgtatttttatttttttgagatacagtgtcactctgtcacccaggctggagtgcaatggtatgatcttggctcaatgcaacctctgccttggggttcatgtgagtctcttccttaggttctgagcacctgggaatgcaggcacatgccactgtgcccggctaatttttgtatttttagtagagatggggtttggtgaaacctgttggccaggctggtctcgaactcctgacctcagatgatccacacatctcagcctcccaagacctgggattacaggcatgagccactgcaccctgtggcactttgtgacattatctaggggagtgtcagttatattgcataccacataccgaaaactcacatataaagtcataaaaatcaattaatcaaatattgcaacccatgataaaacaagcaagaaaataacaagtagatttatacagactgaagaattctaaacaattccctcttaagaaaaaagccaaaacttgtacttaccaccagcacacaacataagaactgaaatagatgttaagatcactactttctgatatatgaggtcaagaaagtatacagcattataaagaatgagaattgactaacagccaggcacggtggcgcatgcctgtaatcccagcactttggtaggctgaggcaggtaaatcaggagttcgagaccagcctgggcaacatggtgaaaccccatctctactaaaaatacaaaaaaattagctgggtgtggtggagggtgcctgtaatcccaggtacttggtagtctgaggcagaaaacatttgtacccagaaggtgaaggttgcagtgagctgagatcatgccactgcattccagcctgggcaacaggatgagactccatctcaaaaaaataaaataagataaataactacttctcaaataagctttggtagatgtggtattctctaataggatgttcctgcagatgcagaccttgagagaatttagcatgggtgtcgactactcatgaataggactagtgcatttatagagacattaaagagcgtgttgcctgttcctcttttcactgtattaggacacagcaggaatatggctggtctaaagcatgaagaaggctgtcaccaggaaccaatttggctggcaccttgctcttggatttcccactttccaaattcatgagaaatcaatgtctttgtcttaagcctcccagtttaagcaatttccttttttgtttgtttttgagatggagtcatgctctatcacccaggctggagtgtagtggcatgattctcctacctcaagtgattctccctcctcagcccagtcttactctgtctcccggtctggagtagagtagcgtgatcttggcgcactgcaacctccacctcctgggttccagtgattctcctgcctcaacctcccaagtagctgggattacaggcgcacgccaccatacacagctaatttttgcatttttagtagagacagggtttcaccatattggccaggcttgtctcaaactcgtgacctcaagtgatcaaccgatcgcagtctcccaaagtgccaggattacaggtgtgagccactgcacctagcccatttttggcatttagtaaattcgaggtttcaccatgttggccagactggtctcaaactcctgacctcaagcgatctacccaccttggtctctgaaagtgctgggattagaaaagtgagacatcacagctggccagtctaagctatttctaacaggacagtgaaatgacagagacaggagaaagagcatctcatcatcaacatcaccaaaggctgacaaatcttattaaacaaaggaagttaagagtctgtactgtaaaacttgcaatacttgaagccatctaatagcactaacatgttttaaaaaacttgagacaggccaggtgcggtggctcatgccagtaatcccagcattttgggaggctgaggtgggaggatcacaaggtcaggagattgagaccatcctgcctaacaagctgaaattctgtctctactaaaaaaatacaaaaaattagcccgcggtgttggcactcacctgtagtcccagctacttggaaggctgaggcaggagaattgcttgaacctgggaagtggaggttgcagtgagccgaggtgacaccactgcactttagcctgggtgacagaccgaaaatctgtctcaaagaaaaaaaaaaaagaaatgaaagaaggctaaagagtaactccaacccacaagcatatataaagttctccaggcctggtgtggtggttcacgccaataatcccagcactttgggaggctgaggctggcagatcaccaggtcaggagattgagactatcctggccaaccaacatggtggaaccccatctctactaaaaatacaaaacttagctgggtgtagtggtgcacacttgtagttgcagctactcgggaggctgaggaaggagaattgcttgaacccagaaggtggaggttgcagtgagcagagatcacaccactgcactccggcctgggcgacagagtgagactccatctcaaaaataataataataaaaataaataaataaataaataaataaagttctccagtaaaggtagtaaaaacagataggccaagcatcgtggttcatgcctgtaatcccaacactttgggaggatgagctgggcagatcacctgaggtcaggagttcgagtccagcctggccaacaaaaagaaacagtctctactaaaaatacaaaattagatgggtgtggtggtgcatatctgtaatcccagcttctcaggggcctgaggcaggagaatcggttgtacccgagaggcagaggttgcagtgagctgagatcgcagcatcgtacttcagcctgggtgacaacagcaaaactcagtctcataaatacataaagtaattaattaataaaaggacagatacagaaactggcatatgtataccttcataactaaacttttttcatatttaaaataaaaggcatgaaaaacactgtacatatatgttaacaaaaatgcaacatacacagaaataattctgacaaataaaaaaatgttctagtggagaagaagaagtcatttttgcaggttacagaattttttttttcttcttttgaaacagagtttcactctgtctcccatgctggagtgcaacggtgcgatctcggctcactgcaacctctgccttccagattcaagtggctctcctgcctcagcctcctgagtagcttggattacagccacccaccacggcgcctggctaatttttgtaactttagtagagacgaagtttcaacatgttaaccaggctagttttgaactcctgacttcaggtgatatgcccatctcagcctctcaaagtgctgggattacaggtgtcagccactgcacacgtccaggttatggtaattttaagtttctttattatgctataactttaatatgtttaacatacctgcaacaataacctctgcccaaatatctaaagaactacaagacaaaactatttaaaataataacaatggttaggcatggcagctcatgcctacggtcccagtgttttgggaatctgaggcaagtgggtcacttgagatcagaagtttgaaaccagcctggccaacatggtgaaacactgtctctactaaaaacacaaaaattagctgggcatggtggtgagcgcctgcagttccagctactcaggaatctggggcataagcatcctttgagcccaggaggcagaggctgcagttagccaagatcgtaccagtgcactgtagcctgggcaacagagtgagactctgtcataaaaaaagagagaaagaaagaatagaaagaaagagcagagagataagcgggggcaaagaaagatatcttttcagagatgtgaggatttaaacttttcttttgccacagaattctcccacttgcagagagtttccccacacactatttgaaggtggagcttccactctgcccatctgagctcttacctgcgtttgcacctgtaatacattcccacccatctggatttttttgttattttcacttaactctccacagtccagggctctttcccttgctccaacatggagacagcaggtcagaaagagactcctgcttataaaaagaaaggaccataacatgctggagcttttctagagtcccagccctatgtttctgtaggaaagaagacattacagatgaatctaggaaaatatttcacaaattcctccactgactgcctcattctgaatgcttggggagcactgtaatatgtagtatgtggacatcgagctctcttccaagaactacagaatcgaaagcacaggagaagcaaacagggaactggatatctttaaagtctgccataaggtttgtttttgtctttgttttttgagacagagtcttgctctgtcgtccgggctggagtgcagtggtgtgttctcagctcaatgcaaaacttggcctcctgggttcaagtaattctctttcctcagcctctctaggagctgggattacacatatgcatcaccatgcccggctaacttttgtatttttagtacagacagggtttctgcatgttggccatgctggttttgaactcctcacccatagcgatccacacgccttggcctcccaaggtgctgggataacaggcgtgagccaccacgaccaggctgccataaagttttatgcctactttacttctggaagctccactgagctatcatgaagaatgcagaacctctaaacaaaggggacagtgaaagtccagatgctacatcatgaagcttttcatttcaaaatcaatacggcttccattttagtcaagtaaggatgtggctcccaagaggcaacaagagaaaatacaaagatacacaagggcacatccccaggaggttatcctcacccagggagaccaggttcctataattctccagcatcacatccctgtaaagagtcctctgagcagggtccaggcatttccactcctcctgagagaattctatggccacgtccctgaatgtcaatagaccctgaaatggaaacacattttaaccaaatggttatggtggagttcttatctttacagaaaatgacaagagagggggaaagcatggatttagttgtagtgaatgttctcacaaatccgagtgacggatttttcaccacatgatgtttttattatactttttgaagtgatcaagacacactttcagtatgaaattcctaagtttgtgaaaaattcaagaaataaataaaaaatcagtgttggattcctgttataaaaatgtttgaaacttttatagacacaccaagtgacattcattatctagatgagagagagcatgactgatgtcttaaaagatgacaatgtccacagtaagagacaggctgggcacagtgacacatgtctgtaatcccagctacgcaggaggctgaggcagaattgcctgatcctgggaggcagaggttgcagagatcccagacagtgtcactgcactccagcctgggcaacagaaactccatctcaaaaaaaaaaaaattaaaaaaaaaaacaaaaaacattagctggacctggtggcaggcacctgcggtcccagctacttggaaggctaaggagggaggatggcttgaccctgagggtggaggttgcagtgagctgtgatcccaccagggcactcaagcctgggcaacaaaccgagaccccatctcaaaataaaataaaatacgtgaaaacaaaattactcaaagtacaaaaatcaattgtgtttctaaattttcacaaaataataaaacctagagactcacaaaacactagatgtgaatacaaagggttgtcatttgtcccagattttcaaaatataaaagattttcaaaatatatacagatgtgtgtatatatgtatttgtatgtatatgtgtgtgcatgtgtgtggggatatatatgtacatatatgaagttttaaaaaatataaaaagtagcaagttttgtttaactgaagaggaatctcatcttgctggaaaaggacacttgggcagttgcgggcagggggaatcttgtcagatctaagaaaatggaaatgccccatcctagaagaagcaatcaccctttcaactgcctgacctggaggaatgttcagatatctgtagtaatgcggacgtgcacagaggcagccactatggcactctttatacagggaaaagttgcaaaggacacatgtgttgtcattcagccaatttccaatgcagatgtcaaagagcaagctagccatgtttactaacatgacaacatgtaaattcacaactagcaggatgaaatatcgaactaaaatatttactggaacacaaagaagaaaatagacactggcgtctacttgagggtggagggtgggaggaaggagagaaacagaaaacataactattatgggcctggcgcggtggctcacgcctgtaatcccagcactttaagaggtcaaggcgggtgaataaccaggtcaagagttcaagaccagcatggccaagataatgaaagcccttctctactaaaaatacaaaaaatagccagacgtggtgttggctgcctgtaatctcagctactcgagaggctgaggcagcaaaacgctttaacccaggaggagggggttgcagtgagctgagatcatgccacttcactgcagcctgggtgacagagcgaaaaaaaaggagcccagtctgagcggcgaaggcggcggcggcggcggtggcggtggtggcagtagcactgggcctgcgggcggtccgggatccaggccggggcggcgccatcttgtgcccggggccggtggggaggccggggaggttgccccggggggcgcaggggacgatgggaacggcctggagtctgaggaactggagcctgaggagctgctgttggagccggagcccgaagaggagccgctccagccccgcgccccatgcctgggagctccaggacctgggcctcgttcaggagccaccggcagccaagaggagggggaggagccgggactggtcgagggtgacccggggctggaagctatcgaagctggagtcagggaggtggaggaagaagctgagaagctaaaggagctacagaacgacgtagagaagcagaggaatatgagtctacctccaggcaatgctggcccagtgatcacgtccattgaggagaagatggaggctgatgcccgttccatcaatgctggcaatgtggactgcggtgcaacagcagaagagctggaagctcactttcatggctgtggttcagtcaaccacgttaccatactctgtgacaaatttagtggccatcccaaagggtttgcatatatagagttctcaaagagtcagtgaggacttccttggccttggatgagtccctatttagaggaaggcaaatcaaggtgatcccaaagcgaaccaacagaccaggcatcagcacaacagaccggggtcttccacgagcccgctaccgcgcccgaccaccaactacagcagttcctgctctccattctacagtggttttaacagcaggctctggggtcgcgtctacaggggccgggctagagcgacatcacggtattccccttactaaaaaaaatgtgtattaggagagagaggaaaaaaagaggaaagaaggggaaaaaaaaagaataaaaaaaaacccaaaaaaaacagaagatgaccttgatggaaaaaaatatatatatatttttaaaaaaagagtccctctccctctccctctccccctccccctccccctccccctccccctccccctccccctccctctccctctccctccacagtctccctctgatgccgagccaaagctggacggtactgctgccatctcggctcactgcaacctccctgcctgattctcctgcctcagcctgccgagtgcctgcgattgcaggcacgcgccgccacgcctgactggttttcgtttttttttttggtggagacggggtttcgctgtgttggctgggctggtctccagctcctaaccacgagtgatccgccagcctcggcctcccgaggtgccgggattgcagatggagtctcgttcactcagtgctcaatggtgcccaggctggagtgcagcggcgtgatctcggctcactacaacctccacctcccagccgcctgccttggcctcccaaagagccgagattgcagcctctgcccggccgccaccccgtctgggaagtgaggagcgactctgcctggccgcccattgtctgggatgtgaggagcccctctgcctggctgcccagtctggaaagtgaggagcgtctctgcccggccgccatcccatctaggaagcgaggagcgcctcttccccgccgccatcccatctaggaagtgaggagcgtctctgcccggccgcccatcgtctgagatgtggggagcacctctgccccaccgccctgtctgggatgtgaggagcgcctctgctgggccgcaaccctgtctgggaggtgaggagcgtctctgcccggccgccccgtctgagaagtgaggaaaccctctgcctggcaaccgccccgtctgagaagtgaggagcccctccgtccggcaaccaccccgtctgggaagtgaggagcgtctccgcccggcagccgccccgtccgggagggaggtcgggggggtcagccccccgcccggccagccgccccgtccgggaggtgaggggctcctctgcccggccgcccctactgggaagtgaggacccctctgcccggccagccgccccgtccgggagggaggtgggggggacagccccccgcccggccagccgccctatccaggaggtgaggggcgcctctgcccggccgcccctactgggaagtgaggagcccctctgcctggccagccgccccgtccgggagggaggtgggggggacagccccccgcccggccagccgccctatccaggaggtgaggggcgcctctgcccggccgcccctactgggaagtgaggagcccctctgcctggccagccgccccgtccgggagggtggtgggggggtcagccccccgcccggccagccgccccatctgggaggtgaggggcgcttctgcccggccgcccctactgggaagtgaggagcccctctgcccggccacgaccccgtctgggaggtgtgcccagcggctcattgagaacgggccatgatgacaatggcggttttgtggaatagaaaggcgggaagggtggggaagaaattgagaaatcggatgattgccgggtctgtgtggatagaagtagacatgggagacttttcattttgttctgtactaagaaaaatacttctgccttgggatcctgttgatctgtgaccttatccccaaccctgtgctctctgaaacatgtgctgtgtccactcagggttaaatggattaagggcggtgcaagatgtgctttgttaaacagatgcttgaaggcagcatgctccttaagagtcatcaccactccctaatctcaagtacccagggacacaaacactgcggaaggccgcagggacctctgcctaggaaaaccagagacctttgttcacttgtttatctgctgaccttccctccactattgtcctatgaccctgccaaatccccctctgcgagaaacacccaagaatgatcaataaaaaaaaaaaaaaaaaaaaaaaaagttttaagtgtgctgtgtagagagtggcatgcttggatgacataaactgggcaagcctttgaggaaatgcatcaccctgattactatagttttaaggctacttaaaaggtccctatgtccaaagaataccctctctgctcactggatagcaggtgaaattccacaatctgagcttcaatccttgaggttaatgcttagtaataaagttaaactaaactatcacccaatttaagcaatttatacattgtgaaaagagaacaatgcaactcagatgaaattttcctaaatctccagttgtggtaatcttggttaatgctttattgtcactataccaatacttttgcatgtatttaaaatgacgctactcatagtaattgcttatctgctcagtggagcaatttaggactacccagcagtcttttaaaaccttggcatttatgaagattaaaaacttgaatggtgaaaaaaaaaaaaaaaaaaaaaagacatactgtggaaggacagagaatccctaacaaactgctgaggagggacctgttttggggagcaggggaaggcccagggagtggggcagggggcggcttattcactctggggattcgccatggacacgtctcaacagtgcaagctgctccccgtgtttccctgccccacttcgcccccgtaggggctgctccagggtaggcgggcgggggtggtaggaggtttttttttttacccagggctctggaaggacaccagactgttcggcttgtcaccttccctccgtcttctcctcacctttcacagtcccctcctgcctgctcctgtccctccaggtctaccacccaccccacccctcttctctggccccctgcccctccagattgcctggtgatctattttgtttccttttgtgtttctttttctgtgttgagtgtctttgtttacaggtttctgcagccagaagatctccgttccgctcccagcagctccactgtaaattccccttccccatggggaaatgcactaccttgttttggggggtttagaggtgtttctgtttttcagttttttgttttgttttgtcttcctttgccttttttcccttttatttggagggaataggaggaagtgggaacagggaggtgggagatggactctgtttatttttttaagctcatttccaggggtgggaattttttttaatatgtgtcatgaataaagttgtttttgaaaataaaaattgtttggacttttacaaaaaagaaaaaacttttttaagttactacagaatttcttctaaagcctcataatgctgcagaaatacacgtgtacaagacttgctctgacacctggcacagaactgacagtaacggctccccagggaggctggaaggaggatggaggacgtgacagggaaaggagatgctttatggccaagggtctaagctgcagctttcttggagcgttaccaccaaacaaatatacacatcgtgtgatgtttaaatataaccatatatatttaataacaattggtggggctgggcatgatggctcgtgtctgtaatcccagcattctgtgaggctgaagcaggcggatcacctgaggtcaggagttcaagaccagcatggccaaaatggtgaaacaccgtctctcctaaaaatacaaaaaaaattagccacgggtgatggcacgtgactataatcccagctacttaggaggctaaaacaggagaatcacttgaacctgggaggcagaggctgcagtgatccgacatcacaccactgcattccagcctggacaaccgagactttgtctcaaaaagaaaaaaaaaagctgggcgaggtggctcacgcctgtgatttcaaaactttgggaggctgaggtgggcagatcacgaggttaggaaatgaaaaccatcctggctaaaaaggtgaaaccccatcactactgaaaataccaaaaaattatctggacatggtggcactcgcttgtattcccagttactcaggagcctgaggcaggagactcgcttgaaccaggaaggcagaggctacagtgagccaagatcacaccactgcgctccagcctgggcaacagagccagaccttgtctcaaaataaaataaatatatgaaaacagaattactcaaagtacgaaaatctttttttgcatatatatgccccaaaaataataaaaccttcaaagactcacaagaaattagatgttaataacaaagtggtcattttccccagactttcaaagtatacatgtgtgtatatatgtatgtatatgtatagatatgtgtgtatgtgtgtgtatatatatatttatatatatatataaaggtttttaaaatataaaaagtagcaagatttgtttaaccgaagaggaatcttgccttggtggaaaggatactttggcagtgggaggaaggagaggagcagaaaaaataactattgggcccgggcacagtggctcacacctgtaatctcagcactttgggaggctgaggctgctggatcacctgaagacaggagttcaacatcagcctggccaacatggtgaaactcttgtctctattaaaaatacaaaaattagccaggtatagtggcaagcacctgtagtcccagctactcgagagtctgaagcaggagacacacttgaacccgggaggtagaggttgcagtgagccgagatcatgccataatactccagtctgggcaacaagatcataactcagtctcaaaaaaataaataaaaaaaataactgtctgggcgtggtggctcacgcctgtaatcccagcactttgggaggccgaggcgggcgaatcatgaggtcaggagatcgagaccatcctggctaccacaatgaaaccccatctctactaaaaatacaaaaaaattagctgggtgtggtggcaggtgcctgtggtcccagctactcgggaggctgaggcaggagaatggtgtgaacccaggaggcggagcttgcagtgagccgagattgcaccactgcactccagcctgggcgacagagcgaggctccatctcaaaaaaaataaataactatcgtgtactggccttgacaacggtgtgatgaaataattggtacaacaaactccaatgacgtgagtttgcctctgtaacaaaccttcacatgtagccccaaacgtaaagtaaaaaaaaatacataaaaatttttctttaatttacaacagaattttttttaaagtctcataatgatgcagaaatacacgtgtacgagactcgctctgacagctaacacagaactgacaatagtggctcgccagtgaggctggaaggagggtggaggatgtgacagggaaaggagatgccttatggcaaagggtctaagctgcagctttgcttggagttttaccacaaaatatatacatcatgtgatgtttacatataaccatttatattcaataataattgttggggctgggcatggtggcttgcacctgtaatcccaacactcttgggggctgaggcaggcagaccacctgaggttaggagttcgaggccagcctggccaacatggtgaaaccctgtttctactaaaaatacaaaaaaattagccaggcaagccgggcgcggtggctcaagcctgtaatcccagcactttgggaggctgaggtgggaggataacgaggtcaggagattgagaccatcctggctaacacggtgaaaccccgtctctactaaaaacacaaaaaattagctaggcatggtggcgggtgcctgtagtcccagctacttgggaggctgaggcaggagaatggcatgaacccaggaggcagagcttgcagtgagccaagatcataccaaagcactccaccctgggtgacagagtgaaaacatcatctcaaaaaaagaaaaaaaaaattagttggggatggtggcgcgcacctataatcccagctactaggtgggttgagacagagaatcgcttcaacctgggagacagaggttgtagtaagctgagatcatgccactgcactgcagcctgggcaacaaagcaagactccgtttcagaaaataataataataataataataataataataataataaaacgtggaatgagaatacagctttatcctcttagataaaaaagcagtactctccaatattagagaaaaattgcaaccacttttaccaaaaacacctgtttcacaagcctctccacagtaacaccatagtctccgtgagctcgatgtgttaagaatggttgaatgactctcctgctattatttacattgatttcatgttcttaaaataatgaaggaataggccaggaacggtggctcacgcttgtaatcccagcactttaggaagccaaagtaggcggatcgcctgaggtcgggagtttgagaccagcctgatcaacatggagaaacctcgtctctactaaaaatacaaaattagctgagcatggtggcgcatgcttgtaatgccagctactcgggaggctgaggcaggagaatctcttgaacccaggaggcggaggttgcggtgagctgagatcacgccattgcactccagcctggataacaagagtgaaactccgcttcaaaaaaaataataataatgaaggaatcattaatgtattattcatctatgtatgaacattccattctaattagtaagatttttggagtcagaaacacaggaactcactcaattacctaaaaatgtggtataaaatcagggagaaaagattttcccttattggtctccttttctagaattgaccacgtactttgtgcacattaatacttgactcccattggcagctgctctaatcctggtccacagagagctgacagtgcatccagatgtggcccctgaacaaaccctgctgcccaacagcactgacaccacgggaccctcaccccgtctccatccatgtctgggtgtgagaccttcccaggaccatgcccagtgcagcctctcccatgttcatgtcactgggtcaccagagatggaatctaagcgagatgagatgaactgaaggaaggcatgggtgagggtgagcaaacatatcaggcaggacacttcagactcagagaagactcccaactccaaggcccagcgtttctgaaaggaaggagacagagcaatccaccgagaataccatctcacctgaggaagagccatccctgactcctttgctttcctcttcctcttctgggtttcttcctcacgtaccaagattctttagaagtcaatcctgaatgttaaaaatatgttgtttattgctcagaatcaacacatcccctccctgtaacacaacaacacatacaaaggagacttcaccttgaggaaatatggtcccctatgctgcctaccgcaccacgaacaaaaaattcctacaggaaaactcccactctactcctggagaagcccacacacacgctgcagcagtggggagctgggctgggatgagctccccttcaggaaatctctaccataaatacaaaaacttagccagatatggtggtgcgcatctgtgtgtctgtggtcccagctacttaggaagctgaggtggaaggatcacttgagctcagaagttcgagaccagcctggccaacatggagaaaccctctctctactaaaaatataaaaattgggctgggctcagtggctcatgcctgtaataccaacactctgaaaggccgaggtgggtggattacttgaggtcaggagttcaagagcagcctggccaacatggtgaaaccctgtctctactaaaaatacaaaaagtagccgggcttgatgcgcatctgtaatcccagctactcaggaggctgaggtagaattgcttgaacctggaaggtggaggttgcagtgacccaagatcgcgccactccactcctgcctgggtgacagagtaagactcaaaaataaaaaaatacaaatacaaatacaaaaattagcagggtgtggtggcacacacctgtaatcttagctacttgggaggctgaggcacaagaatcacttgaacccaggagatacaggttgcagtgagccaagatcacaagactgcactcatagcctggaggacagaatgagagtctgtttgggaaaaaaaaaaaaaaaaaaagtgcatttctgatgggactgacacagagataagaagacttgagtaatgtgatagacactgatgggcagagggaacttcagatgggggtgggagggcatgggagacagctctgagcctagatctgaaggagaaagggacagtgccatcttcatttagaaacattgaataagaacagggacaacaacctgagacaggaaggattttgatgtttgaaaaaagagaaaagcaaatgtgactggggcagagggagtcagatgagggtaagctcccaggaggaggctggacactggcagggaccctgaacacagggctgtggagccaaagtgaagagttgggcttttgtcctggggaacacgggaagcaggtggagggttccctgccaggcactgacatgacctgctttagatgtagctgtgatattctaatacagacaaagtcctccgaagatggtctctctttctgagtctaccactctctttcttccattctattgcttttttttttcatttttggggtactgcatcccactgaaaattctaattacaactgggcactcccctctaccagaaaaaaagccacacccagacacccactctattttgccaatcatttcagtggccagggtcactcgggttgagcttttctggtctagcccctcatctccaagttgcaggggaggctcactggggctcagagctggaaacattttcacgaagttaccctgagaaggtctgagatgagtgagaaggtgtgcctgaattcttacatgggggcctggaagggctaatgggatggactggtcttatcatcccatccttaaaattagagaagcatctttcacatgcctgggttaaagaaaattcttttgaaaggttctgatgaaattgactcccaacattgaattcttccttacaagaaaatcacactaacatttataaaatgcagcagtgtaaacacacagctcttgaccttgaaaacagggtcaactgtagaactaagacataagcaaattatttcaatcaagaatacatgggtggacagctgaggtggttcacacctgtaattccagcactttgggaggtggaggtgggtggattacctgaggtcaggagtttgagaccaacctggccaacatggtgaaaccctatctctactagaaatacaaaaattagctgggctccatccttgcaacttatttaacctcttttttttttttttttttttgagacggagtctcgctctgtcgtccaggccggactgcggactgcagtggcgcaatctcggctcactgcaagctctgcttcccgggttcacgccattctcctgcctcagcctcccgagtagctgggactacaggcgcccgccaccgcgcccggctaattttttgtatttttagtagagacggggtttcaccttgttagccaggatggtctcgatctcctgacctcatgatccacccgcctcggcctcccaaagtgctgggattacaggcgtgagccaccgcgcccggcccttatttaacctcttgttggtccttctccccaatctttagatcgtcctcaatctccatagatttccacctcttctcccctctctgctctccctgttaaattctctcttctctgttataaccccctggacccagtctggcaccccagatccccaggtgtcctccccgctgtgcttctccctctgttctccttgccaccagcaccactctgctctgtctgacccggctccacatccctcctcctctccctcactctgatgagcctccacatttctgcccctctccctaccttgctgtctgtccttcatctctctgtacatctagcttttctctacatttctccagttgcttttctcctcctgctttcttatcttttatcacttttgctgtctcttggcaaatccctcaccatcctctactttgccatctgttatgggtctttctcattcttcttttctctgtctcaggttttctactgctctcttagtccctctctctgtctcctgatccctttggcccacacgatcacacgagggtttggagtaagacacctgcatctcggagaagcgcattttcccagagctggagctgggcgggcaagaacaccccgcgtcacaggacaagccccaggcacctctccaacgcgggctcaggggaagcggtgactgcggaggggagatctggggagcagcagggcccagcaagaggaggagggaggtggggagcgacgacgccttcggacaagggtgggatccgcaggatcccaggaccacagaacgcagccttcccgggactggggtcgccgcgctgtgctccaggaacccaggaggatgaggctgggaggcgcacagggtgggaatacacctctagggtgaggactttaaaaagagccgtgcggaaggagtcaaaaaaaggttttgagcaggaaaactacgagataggaagtgtatacattgccctgtagcagaaagacccgggacgggaccagcctcagggcgactttaaacctaaaaagaaggggcttccggactcccagtagaacatctccatttgctctgagtgaacgaagaaaggggagaacttccaggtctagggggaccccacatcccatgtacagaagtgccggggacctgggaagctcagacttaacaccacacagagcaaaactcaccgcccgccgcggcgtcaccgtcattccacgggatccgcttcctggtctgcgcgaatctgcgcgcgcaggacagaaaccaggcctgggtggagccaacgaggaggcgagcggggcccgggtgaggtgtgggcggggcgcgaagcggcgagaccttgccctttagaacccgcagagggcggggccggagcgggacctgtgagtctcagcctcctcccaggccatgttctcaggcttttgaacccgggagatacagcttgcattgggccgagatcgagccactgcacaccagcctgggcaacagagccagactccgtctctaaaaaaaaataaaaaaataaaaaaataataaaaaaaaaatttgcttgtgcgagacagggatacaacattactcttttccgtgtggatatccagttagttgtcccagcacatttgtaaaagagatctattactttctcctttttatttacatttttttcttttctttttcccttttttttttttttttttttgaggctatttctctgtcgccctggctggagtgcagtggcgagatcttgactcactgcagcctctgcctcctgggttgaagcgattcttctgcctcagcctccggagtagctggcactacaggcacacccaccatgcccggttaatttttgtattttgtgtagagacaggatttcgccatgttggacaggctggtctcgaactcctgacttcaagtgatccgactgccttggcctccccaagtgctgggattacaggcctgagccactgtgcctggcccaggaaatactctttactttgctttttaaatgttgagaaaatacaactgaaaactaaaaaatcttccccgaaatgagaaatcatcttcatgacaaaacaggaagaaataagaactattctattaatgaataagccttagaccagaatgtgttgggaaatagaggcaaacagctaagaggttgaaaagagagaaagaaacttcattgttctatgcaacccgttaagtacatgttttcaagataaacactaatcagtcctcagggaagattagttgacaacagccttggtcgcacatagttcatcctggctgtacttggtaatggaggtgactatctgtgtcagctagttagcttcatgcagagagaggggaattactttaacccacgtctttttgacaagtgtgagttttacaacatggaggcaggtgccgtctctagtgaggctgctacagtccgacagaaactgacgtcagcagtaaataataaaatttagaatacataattaactatagagtttattggaacacaaagcttgaggatagccacctggaaacgtcaactccaaatgaagggggcccgtgttcccaagtagagacgttaaggtttcacacacagggaaagacagagaagctttaccagaatcacattttccattcaaggccagtgcataggctgcagcaaattgattggttatggattgatacacttcaaggaaggttactttatcactccataagaagggacaatgatgccaacaggttagtcttcctaattatttacaggtaaactttttttaaaatttatattaggaaactaaattttattgcactttttgttttgttttgttttggtttggtttttggtacggagtcttgctctgttgcccaggctggagtgcagtggtgcaatcttggctcactgtgacctccatctcccgggttcaagcagctctcctgcctcagcctcctgagtagctgggattacaggcacacgccaccatgcctggctaatgcttttgtattttcagtagacacggggtttcaccatgttggccaggctggtttctaattcctgacctcaagtgatccacccaccttagcctcccaaagtgctgagactacaggcgtgcgccaccgcacctggccagtaaaactcttagaagttgcgcctgcacaccactggactcaggttgcatgaccacgttcctctcaaagctcagaattatttaaatgtccgtagctttaaatttgaaatatttgatgtttgaattatttaacttcctactgagatataggtactatcgcccttgtagtttgccttacaaggatcgttcccaagaccttcagaaatacatccttgggtcattaaactgaaaaaaggcttagttactttctaaaaaataccacttcaggccaggcgcggtggttcaagcctgtaatcccagcgttttggaaggccgaggaggacagatggcctgaggtcggaagttggagaccggcctgaccaatatggagaaaccccatctctcctataaatacaaaaattagcctggcctgttggcatgtgcctctattcccagctactcgggaggctgagggaggtgaatcgcttgagcccaggagacacggaggttgtggtgagccaagatcacgccattgcactccagcccaggcaacaacagtgaaactccgtctcaaaaacaaaaaataaataataataataataataataataaatatggccggcgcagtggctcatgcctgagtgagactccgtctcaaaacaaaataaaacaaaacaaaacaaaaaacaaaaaaaacacattaccagttccacagtagggtgtcctcaaaaacaaaggaaatgcctcctctttaagtttttcttacataggcatccaggtaaatacaaagatatgtctacctgccggttggctgacagtctaacacaacttattactttgttgatttaaagctatccatgactggtcgcggtggctcatgcctgcaatcccggcactttgggtggccgaggtgggcagatcacctgaggtcaggactgtgaaaccagcctggccaacagggtaaaaccccatctctactaaagatacaaaaattagcgaggtgtggtggtgcgcgcctgtagtcccagatactcaagaggatgagacagaagaatcaattgaacctgggaggcagaggttgcagtgagctgagattgtgccactgcactccagcctgggtgacatagagagactccatctcaaaaaaaagaaataactaactttaaagacgaaaataaagaaaaatctggagaggtctcaggaatctctagccagtctgattggagagtgttcttcctcactgaagtcagacaccaaaaaccgtgaaagctggctgatttctgaactgctgaagttccaacagaacataaccagatatacaaagagataacgtggatgatcccaagaaattatacacaaatttataaaacagagacttagaaataacgggactaaaaattcaaaataagcctgggcaacatgttgaaaccatgtttctaccaaaaatacaaaaattagctggacacggtggtgcacacctgtagttccagctacttgggaggctgagatgggaggattgcttgagcctgaaatgcagaggctgcagggcacatggtgctctctcatgttctcagagagggcgcttttacacctgggggtagggatggaatcttcccagatctaagaaatgaggaaatgccacgtcctagaagaagcaatcagtttctcaatagcccctcctgcaggaaccctccagatacatgtagcgaagtcagcacactcacaggcagccagtgtggcattcttggtaacagtgacaaactgggaaggactcacgtgtcttcattcagaaaatgctccaaggagaatgaaaaacagtaagctatcttgcttcctaccttgaaaacatggaatattttaagacttgcaggataaaataccacaacaaaacatttatcatgttgagctcagtggctcacgcatgtaatcccagtacttgggaggccgaggagggaggatcacttgaggccaggagtctaagaccagcctggccaatatggagaaactccatctctactaaaaatataacaattagccaagcatgatggcacatacctgtaacacagctactcagttggctgaggctagagaatcatttgaacccatgaagcagaggttgcaatgtgctagtaagttccagcctgttgacagggtgagacaccggtctcacaaaacatacaaaacaaaaaacaacaacaaaaaaatcatttggccgggcacagtggctcatgcctgtaatcccagcacttcgggaggctgagggggatggatcactagaagccaggagtgccagaccaccctggccaacatggtgaaactccatctctattaaaaatacaaaaaacttatccaggcatagtggcacacacctttagtcccaggtattcaggaggctgaggcacaagaatcacttgaacctggaggaaagagtctgcagtgaggcaagattgcgccactgcgctccagtctgggtgacaggcacattcatcaaataattttatctaaaatctcataatggtgtctgaatacatttctgtaggacttacgctgacttgccacagtactctcagcagtgattccccattgagccaagggaactggtggaaggctggacaggaaaggggatgcctaagtgaactttctttgtccgggagtggttgctcaacgcctgtaatcctagcactttgggaggccgatttcttgttttaaaagcaataatagaacaaattatcctctaccactgatgttacctccactttccattccattctaagtcattaaaagtgcagagtcaaaactgggaattgcggcaaatgcttgtaatcccagcattttgggagtccaagatggatggatcacctgagttcagaggtctgagaccagcctgaccaatgtggtgaaaccctgtttctactaaaagtacaaaacttagcgctgggtgggctggctcacacctgtaatcccagcactttgggaggatgaggtggaaagatcatgaggtcaggattttgaaagcagcctggccaacaaggcaaaaccccatctctactaaaaatacaaatattagctgggtgtgatggtgcatgcctgtagtcccagctactcagaaggttgaggtaggagaattgcttgaacccgggaggcagaggttgcagtgagccgagaccacaccaatgcactccagcctgggtgacagaatgaggctccatctcaaaaaacaaacaaacaaaaactcagctgggcctggtggtgcacacctgtagtcccagctacttgggaggctgagccaggagaactgcttgaacccaggaggtggagggtgcagtgagctgacagatattgtgccactgccatccagcctggcgacagagcaagactccattctcacccacctaaaaaagaaaaaaaagtgcagagtccagccaggctggctgtctcatatctgttatctcagcaatttgggaggctgaaatgggaggctgaaatgggaagatcacttgaggccaggagctcaaagctatagtgagctttgactataccaccgtactcctgcctggacaaaatagcaagatcccatagccacataataaaaaatgaaagacttagccagatatggtgacacatgcctgtcatcctagctccttgggagggtaatgtgtggatcacttgagaccaggagttcgaggctgctataaactagaattgtaccattgcactccagactgggccatagagcaaaaccctgtctctaaaaacaaaaaaaaaaaaagaaaaaaagaaaattggcttcaaatgcattacaaaatcagaaacaaaatatctccctttattggtctcctttccagaatgcacaagatatcagtgcacattaatgtatggctttcatatgtagtttctgggatccagtccacaaagagctaaacgtgcatccaaatgtggtgcctgaacaatcccagctgccccgcagcactgacaccatggggcccataccccatctccatccatgtctggtgtgagcccttcccaagaccatgcccagtgcagcctctatggaaattcacgtcactgagttatagaagaaggatttttttttttttttgagatggagtcttgcggtgtctgctcactgcaagttccgcctcccaggttcatgccatttttctgcctcagcctcccgagtagctgggactacaggcacccgccaccacgcctggctaatttttttgtatttttagtagagacagggtttcaccatgttagccaggatggtctcgatctcctgacctcatgatccacccgcctcagcctcccaaagtgctgggataacaggcgtgagccaccgcgcccggcctagaagatggaatttaagcgaagatgagagggaatgacagaaggcatgggtgagtgcgagcaaacgtgtcacgcaggacgcttcagactcagaaaagactggctactgtaatacctggcttttcagaaagaaaggagacaggataatccacaaggaatatcaagtatatccatgcaaaacaggcactttgtgattttttttaattttctgtatttttatttttttgagacaaagtcttgctctgtcacccaggctggagtaaaatggcgcgatctcacctaaatgcaacctccgcctcctgagttccagcaattctcctgcctcagcctcctgagtagctgggattacaggcatgctccaccatgcatggctaattgttgcatttttagtagagataaggtttcaccatgtaggccaggctggtctcgaactcctgacctcaagtgatccacccacctcaaccccccaaagtcctaggattacaggcatgaggcactgcacccggtggcactttgtgacattaacaagtgaagtgccatttgaacccgggaggcagaagttgcgctgagccgagatcatgcaattgcactccagcctgggtaacagggagagactttctctcaaaaaagaaaagaagaaatgactaacagtgtcagagggctcaattacgatgttacaactacagttaaataacagccaggccatacagcaattctatatatacgcatttcccttagttatctagttcaccatgcataagatataaaacatagaatgtgtactgggaaaattgataaactgggatcagagaaaacattgtataaaacaaattgtacaacaaaaacattaaaaaaatgatgcaggctccctggtctgaatgtttgtattggccaaaagccatgttcagagttcttattctccaataggatgttcctgcagattcggcctttcagataatttgatcatgggtgttgactactcatgaataagaccagtgcctttatttttatttttatttctttatttatttttttgagacggggtctccccctgtcacccaggctggaatgctgtggcaggatctcggctgaatgcaagctctgcctcccagattcacgccattctcctgcctcagactcccgagtagctgggaacacaggcgcctgccaccacgcctggctaattttgtttctgtatttttagtagagatggggtttcaccatgccagccaggatggtcttcatctcctgaccttgtgattcacccgcctcggcctcccaaagtgctgggatcacaggcgtgagccacctcactcagccttatttttatttttttctttttttattttattttattttattttattttattttattttattttattttactttaagttttagggtacatgtgcacattgtgcaggttagttacatatgtatacatgtgccatgctggtgcgctgcacccactaactcgtcatctagcattaggtatctctcccaatgctatccctcccccctcccccctatttttttctttatttttgagaaagagtttcactcttattgcccaggctagagtgcaatggcctgatcttggctcactgtaacctctgcctcctgggttcaagtgattctcctgtctcagcctcctgtgtagctgggatttcaggcatgtgccaccacactcagctaattttgtatttgtagtagagatggggttttaccatgttggccaggctggtctcgaactcctgacctcaggtgatctgcccgtctcggccgcccaaagtactgggattacaggcttgagccaccgcacccggccatccattgttttgtgttcagtagattcgaggattcaccatgttggactgactggtctcaaactcctcgcctcaagcgatctacccccctcagcctcccaaagtgctgggattagaggtgtgagccaccatggccagccagtctaagctgtttctgacaggacagtgaaatgacggagacaggaaaaggagcatgtcatcatcaacatcgctgaaggctgacaactcttattacacaaaggcagtttacagcctgtcatataaaagctgcaatgtgtgaagccatctaatagcactaacttgtttaaaaacctggaggcagctgggaacggtggctcatgcttgtaatcccaacactttggaagaccgcagtgggtggatcacctgaagttgggagtttgagagcagtctgactgacatggaaaaaccccgtctctacttcaaatacaaaattagctgggtgtgttggtgcatgcctgtaatcccagctacttgggagcctcaggcaggagaatagcttgaacctgcgggcagaggctggagtgagctgaggttgcaccactgcagtccagcgtgggcaacaagagcgaaactccatctcaaaaaacaaacaaacaaaaaatctggagaaaaattaacattatttctcaaataagttctcaaataagtacagcaggcccacagtgttcacgtacatgaccccaatttgcacatacagtaagtgagggacaaacttgatcctgggcctgaaggatcccacgacatgtttctaagcacaatagtccaccaagaaagtacagaaaacaaccagtcacaaaaaatacaaggagaacagaaagaagtacatcaagggggatacaaggactgagctgggacacaagcgctgagctgcgctgctgacagtggttctgaagccatccctcatggatcatgtgctgagtcatgatgccctgcacacactgatttaagcagcctcctataattttgtccagtggatgaataaggtcttgacttactcagggagagtagtgttggaggggaggggctcacggggaaattggggtgttcacttttacaaagtcaataggctggtatttgcatccagatcaatgtatcatgtgaggcaaggccaggaaaggaagggcaagggtggagagcaggaagtaatgggcatgtaggagtgaactttgtgcatgcacatctgtgggaatataattccaccaggatagaccaaatcttgagctcggaggaaagtggaactaatttagcaaatggtaaaacattgacccaagcttaaatatgcaaattacaatacaggcaagggacaagaatgaacgagatccaaaaaagcagcagtatggtgacctgaggtgaaagcagttttacgtctcttaaattaaatggcctctgatacctagtttcaagcatatactcaacaatatgccttgtatagattccagaatttcatacacacacacaaaatgagtaaagtctacgaggagtgcagcaatgaaggagaccatggatgtgaagaattccctggctgagtaggtagagatgtgtctgtggaaacagagacagactgagcgcagtggctcatgcctgtaataacaatcataataataatgacaggttttttctgttttctctttttttgagatggagtgtcactctattgctcaggctggagtgcagtggtgtgatctcggctcactgcaacccctgccacccaggtttaagcaattctcttgcctcagcctcccgagtagctgggataacaggcgcctgccaccaggcctggctaaaagtttgtatttatttttgtttttttgtttttttgtttttttttgagacagagtcttggtctgtctcccaggctggagtgcaatggtgcgatctcggctcactgcaagctccacctcccagattcacgccactctcctgcctcagcctcccaagtagctgggactacaggtgcccgccaccacgcccagctaattttttttgtatttttattagagatggggtttcaccgtgttagccaggatggtctcgatctcccgacctcatgatctgcccacctcggcctcccaaagtgctgggattacaggcatgtgccactgctcccatcctaaattttgtatttttagtagatacagggtttccccattttggtcaggctggtcttgaactcctgagcacccgactcagcctcccaaagtgctgggattacaggcataagccaccatgcccagccccttcttactattaactcattattgtgatagttgacaacaatgaaaaatcttaaaatcattacaattattataaaaaataaaacaatgcaaatgttgtgttttctacataaaccatgggcttatccatccacgtattcatgcacacacatcacatcacagtgtaatcccagctactcgagaggctcaggcaaaagaatcgctgtaatccaggaagcggaggctacagtgagaaaatatctcactactgcactccagcctgagtgacagattgaaactgaactaacaaaaaaataagtaaaatcaatgatgtgataaagcatcctgtaccactgatgtgtatcttcactttccattcctttccgagtcattaaaactgcagagacaggccgggcacggtggctcaggcttgtaatcccagcactttgggaggctaaggtgaaaaaacacaaggtcaggagttcctgaccagcctgaccaatatggtgaaatctcatctctactaagaatacagaaaaattagtcaggcaaggtggcacatgcctgtaatcccagccactcgggaggctaaggcagaagaattgcttgaacccaggaggcagatgttgcagtcagctgagatcccatcactgcactccagcttgggcaatagagcgagactccatctcaaaataaataaataaataaaacaattagccgcttgtggtgacacatgcctatcattcaagctctttgggaggctgaagtggggattacttgagccaaggagtttcaggctgctgtaaactctaaattgtgccattgtactccagaactaagctacagagcgacattttctctctctctctccttttttttcttttgagatggagtcttgccctgttgcctaggctggagtgcagtggcacaatcttggcttactgtaacctccacctcccggattcaagtgattctcctgcctcagcctcctgagtggctgagattacaggcatgagccacgacttccagctaatttttgtatttttattagagatgaggttttaccacatgggccaggctggtctcaaactcctgacctcaagtgatccacctgccttggctcccaaagtgctgggattacaggcataagccaccacacccagaccaacatcctgtctactagtgtgccttcaaatgcattaagaaattggatacaaaatgtctccccttattggtctccttttccagaatttaccagatatctgtgcacattaatgtatgtatttcatatgtagtttctctgatctggtccacgaagagctgacatccagacatgacccttgaacaatccaggttgcccagcagcactgacaccatggggcccacaccctgtgtccatccatgtctaggtgtgaggccttcccaggaccatgcccagtggaacctcttctcaagttcatgtcactgggtcacaggagatggaatctcagagcaggtgagaggaactgagggcaggcatgggtgagtgtgagtgaacctgtcaggcaaaatgcttcagactcagaaatgactggctactaaatacctggtgtttcagaaaggaaagagacagattaatccaaagaggaatatcacttcacctgaggaagagccatgcctggctcctttcctttcctcttctgagctgcttcctcatgtaacatgagtctttagaaatcaatcctgtacgtgaaaaaagtatgaaacttcacgtagaaatgactcactcccttcctgtgacaaaaacacacagacaggggagatgtcaccctgtagaaagatggtcctctgaggcccactgcaccagagatcatgcagagataagaaagtcccaccggaagacctacaagtgtatgtttgaccccagtcttcagatctcgcccccctcctggagaagccaccacacacgaggcagcagtggggagctgggctggactgatctcctcttcagggcacacactcatccctgatcaaaccccatccagaggacaacccctcacttctctgtggatcacaggctgagctcagcccccagaaatggaggactcagagcttcgatgctcaatgctgcacacagatgacaagcaactgcgccactgcaggtattactgagggtgggttccatcccatcagaataagaatccctgctaaagcagcacaaaagctctatttgcaaaatgcctctagactctaatgtgaagccagggttgagctccactcagagggggtgagcccagcacagccccacattctggctctgccctccccttggggccttgttctcaccaggatccagacagtggatgacaaaggcacaaaaataatcacacagaacaggcaacgtggacgagaggtggggtgaatgatgggctgtgtgaaaggaaataaatctgtgagcccccaaatcattaagcaaaaggcaaaagtcaagctgggaactgcttagggaaccagactccccttctattcaaagtcacccctctgctccctgatatagatgcatgtctgagtgcctccttcaaaaggctaatcagaaactcaaaagaagggcccagcacagtggctcatgcctgtaatcccagcactgtgggaggctgatgcagtgagctgagatcataccactgcactccagcctgggcaacaaaatgagacttcatctcaaaaaaacaaaacaaaacaaaacaaaaacttaaaagattgcaaccatctgtgcctcatttatctgtgacctggaagtcacctccctgcttgaacctgggagaaggaggttgcagtgaatcgagatctatagggtccagccctttggggcttagtgggtgttctccccatgtgcagagacaagagattgtaataaataaagacagaagacaaagagataaagagaaaacagctgggcccgggggaccactaccatcaagacgtggagaccagcagtggccccaaatggctgggcgcgccgatatttattgcatacaagacaagggggcagggtaaggagggtgaatcttctaagtgattgataaggtgaagcaaatcatgtgatcacaggacagggggcccttccctcttaggtagccgaagcagagagagaaggcagcatacgtcagcgttttcttctatgcacttataagaaagatcaaagacttcaagactttcactattccttctaccgctatctactacgaacttcaaagaggagccaggagtacgggaggagcatgaaagtggacaaggagcatgaccattgaagcacagcaccacagggaggggtttaggcctccggatgactgcgggcaggcctggatactatccagccttccacgagaagctggtggagcagagtgttccctgactcctccaaggaaaggagaccccctttcgtggtcagctaagtaacaggtgccttcccagacactggcgttaccgcttgaccaaggacccctcaagcggcccttatgcgggcgtgacagaggcctcacctcttgccttctaggtcacttctcaccatgtcccttcagcacctgaccctatacctgccggttattcctaggttatattagtaatgcaacaaagagtaatattaaaagctaatgattaataatgtttataataatgattgataattgtccatgatcatctctatatctaatttgtattatgactattcttattctaactattttctctattatactgaaacagtttgtgccttcagtctcttgcctcagcagctgggtgatcctccacccacagagataaagccctgcactacagcctgggcgagaagagccaaactccaacacacacacaaagaaagaatttcagaagtgatgtatcttctcagtcctttcatgtatacatgcaaatttctctttacattacaaattacaacacttacaaataaagtaatttatttcccatatttaaaatacatgctgtcaagttcggctaagtttccggacgtacacagtcaccctcatctgagatgtgcagactgcaagggaatgtgtttgggggtttaggaagtcacttttggacatgtgaaggtggagatgcctgtttgatgtcccagcagagaggtgagcagacaactgcacacaggattgtagagctcagtggagaggcctgcaggggacatgggtaggtgggttaaagctgtgagatgagataaggaaaagcagtgggtgtggacagagacaagaataggttcaagacaatttgagtcaaatctcttgttttttccattccggtatttttgttttttacatttttgtaggacaggaatctattaaaaattcaaattacacctgagcatcaccctctcctaaaggaaaagccacaaactatttgacaaagtatttcaggggtcagtgtcactctgactgagcttttctggtctcattcctcacctgtacattactggttgagtcactgttgtttcgagcaggagatacttcaccaaaagtacaaaaaattagccaggcgtggtggtgtgcatctgtggtctcagccatttaagaactgactggggtggatatttgggcctgggaggcagaggttgcgttaagccaagatcgtgtcactgcatgcaagtatgggtgaccgagtgacaccctgtctcaaaaaaagaaagaaaaaaaaacattccaggacaattttatacacctgagcaaatgaaatgtctctttcaatgtctaaggtcctgatggcatgaatcctaaacatgtaattattttcccagaaaaatgacagtagtacattcaaaatacacacaactgtgaacccctagctataggtgtttaaaacactgaaagagaagcagcattacaaatgagatctgaacaaatgttttcttcttgaacacacgggctttgctggaacaaggttccaagtcaattctgcccatccttgaacatctgcaaaaaatattatggaccagaggaacttgaggggaacgtttacttagcagctcacagctcaccattttatcaggtgacataaagaaagaaaatggaataataggctacttcaactaaattttgatgttagcataaagaaaaagttccttgatatctttatcaagtacacattgaaacaaactaaaatcatttatcaggtaccagaaaatgtttccaatgtatgatacagactagaaagcatgccgtcctcaatgtaaactgaacacaataaatttcagagaaaaacagttttaaaatggttaaaaaatatatctaatgaaatgtggggtcatagaagaatattttgaacacatattatagttgcaaaacaatgatgttacctcataagattatatcaaagcttttttgagaagcagtattttatttattttattttttttattttatttgagacagagtcttgctgtggcccagctggactgcagttgtgcgatctcggctcactgcaacctctgcttccaaaatgaaagccattcttctaccagcctcccgagtagctgtgttacaggcactcgccacaccaagctaattcctacattttagtcaacattgtcttgtcccaacttaaaatgacttatgcatttacaaaacagtgatttctttggggcatcgcccccataaccttttcataaagcattaatgatttcattgttcctctacccaaatttcaccatattcattttttgagacactgtctgtctctgtcacccatgctggagtacagtggcatgatcacggctccctacagcctctaactcccaggctcaagccatcctcccactgcagtctccacagaagctgaaccagcaggcatgtgccaccatgcctagctaatttatgtattttttgtagagaagggggtttcaacattctgcccaggctggtcttgaataccggggctcacgtgacccacctgtctcggcctctgaaagtgcttggattacaggcctgagccactgcatctgctctcatcataaatttgatgtttcttcttgtttcaattttagcaaaatttacactgctttcttttttcaaactcatgtcttccccttctgagtgcctcaaactagaccctgttcagacatgttataacagatttgtgccagtttattttggtgcagaaaatgtgacatcatgtgcaattttcacataatatgtatttttttcatgaacttcttgaagaccccttgtactagcgaactgtattcaagaggatattaaaaggattgtagatatgcaagtgccacttatttctgggatgcaaggatggttcaacatagtcaagcaaatcaatgtgatataccacttgaacacaatgaaagatgaaaaccacatcatctcaatacatggagaaaaagcatttcacaaaagtcaacatcaagtcatcatagaaatcccacacaaaatagatacagaagaaaatttacctcagcaatacaaagaccatccatgaaatgaccacagcagaaataaccaatcagggaaaacggaatgcttttcctgtaggatctcacatgatgcaagaatgctctcaccccttctattcaatcaatactggctgtcctagccagaacaatgaaatagcaaaagaaatcaaactcatccaaatcagaaagaaagaagtcaaattttatttgtttgtagatgacatgaccttctgtaaagaaaatcacaaagagtcagccaaaatgcaactggaactaacaaacacattcagtttatttgcagaatagaataacagcaccaaaaattagttgaatttccatacattaacaataaataattttaaaagaaaattaaaaaccaattccatttgctaaagaacttaaagtaagaaatatttaggaataaacataaaaagtgaggtttgtaccttgaaatctataaacattgatcaaaatgattaaaaacatgtataaatagatataaatcccatactgattggaaaaatgaatatcgctcaatgattatatactcaattgtgatttagattcggtacaatactcatagaagtctctataactttttgttaaagaaacaaaaaacaggccaggcacagtggctcactcctgtaatctcagcactttgggaggtggagtcgggtggatcataaagtcagaagatagagaccattctggctaacacggtgaaacccagtctctactaaaaacacaaaaaattacccaggtgtggtggcacacaactgtagtgtcagctacttgggagactgaggcaggagaattgcttgaacctgggaggaggaggttgcagtgagctgagatcgtgccactgcactccaacctgggcgacagagcaagactccatctcaaaaaaaaaacaagaaaaagaaaataaaggctgggaaaagtagctcccatctgttggctaggctgttctcaaactcgtgagctccagtgacctacctgtctttgcctctcaaagtgctggaattacaggcatgagccatggcccccagtgcaatcctcttaacataaacagtttaatggcaattaatgcttgaaatcaatgttaaatcaacaaactcaggtcaaggctgatttgactctaatgtcaattaatgcttgatggtttgctatactcactgcatttgaaacaactgtctccaaaaggaattgtctgatggtctgcaaggagtgaccttggactgaagacccttccacactgatgacatttgtaagatttctgtccagcatggattctctgatgtctaatgaggtgtgaatgtgaagtaaacgctttgccacaatcatcacacttgtgaggtttctctcctgtatgaatcctcctatgttttgcataggatgaagcttgactgaagaccttgcctcaatcatgacatttataaggtttctctccagcatgagttcaccagtgaaatgcaaggcatgaacgatgtctgaaaaatttgccacatttattacacttgtaagatctcttcactgtggattctccaatgatgtgcaatggttgtagcattactgaaaactttgtgacaatcattacattagtcaagtttccctataccatggattgcttgatggtgaataagtggtgactgcccactaaagggtttgccacactcattgcacttgtaaggtttctctccagtgtgaattctagtatggggtgccacgtgtgaatcattcccgaaagccttgtcacaaaccttacatttctatggcttttctccagtgtgaattctcctatgtatttgaagctggatttgtgaatgaaaactttgtcacattgttcacgtttgtaagatttctatgcagtatgaagtctatgatgacttgcaaggtgtgattgttgattaaaaaccatgtcacattcattgtgcttgtaaggtttctctccactatgaattacaaggtgtgaattttgaccttttaattacaaggtgtgaattttgaccaacggtcttgccacactcattacacttataatgagtttctctccagtgtgaattctagtatgttttgccagatatgcattatatgcaaaaaccttgtcacaaaccttacctctgtatggtttctcttcaatgtgaattttcttatgtgttttaaggtttgatttacaactgaaaacttttgtcacattcctcccatttgtaaggtttctctccagtatgaagtctatggtgatgtgcaaaggttgctttttgattaaaaaccttgccacattcattatgcttgtaaggtttctctccagtatgaattgccttatgacttacagggttgaattgtgatggaaggtcttgccacactcattacactattaaggcttctctccactatgaagcctatgatggtatacaagggatgacatctgactgaaggtcttgccacactcattacacttgtaaggtttctctccagtatgaagcctacgatggattataagcgatgatgtctgaccgaaggtcttgccacactcattacacttgtaaggtttctctccagtatgaactctctgatgttgtgccaggtgtgaatccctctggaaagccttgtcacaaaccttacatttgtatggtttctctccagtatgaatcctcctgtgtctttccaggtttgatttgcgactgaaaactttgcaacattcttcacatttgtaaggtttctctccactatgaatcctcctatgtctttcaaggtgtgatttgcgactgaaaactttgtcacactcttcacatttgtaaggtttctctccagtatgaagtctatgatggcgtgcaagggttgatagtcgattaaaaactttgccacattcattacatgtgtaaggtttctctccagtgtgaagtatagtatgttttgccagatatgaattatatgcgaaagcctcatcacaaaccttacatttgtatggtttctctccagtatgaatcctcttatgtctttcaaggtgtgatttgcgactgaaaactttgtcacattcttcacattcataaggtttctctccagtatgaagcgctttgtgaatgaagagggatgaattatgaccaaaggtcttgccacactcattacacttgtaaggtttctcaccagtgtgacatctacgatggcaggcaaggtatcgcttctgattaaagaccttgccacatacatcacatttacattgtttctcttctaagtgaattatctgatgtttttttaagagtgagctgcaattaaaggatttgaagctctgtatacattcaaaagatttttctctcatgtgtacttcccatttttgtgtgagtaatgaagaatggagggaattatttccatacttattagaaatatgggttttgggcctacaacaaattctttgggatgttgaaactgaggaagcattgttgatagacttctcaacttgattaccaattttcccttcagactgaaatatgtgcggttcaggcagatgcaaatgaaagcttgatccaagctgatctttaatacgcttgtttccagcatgcctttgatcatgttggcctgtactaccagccaactctttgatttctgtcatgggtgctgcatggccatttgtttcatcttctttccactgaaactcgaagccatgaatgtctttctcaatttcatggaaacaaaattctccaatgtgatgacttgcttgtctgtgcaatgtccctgtgtggatcacttctgtattgccttgccctgttgacgacaacgtcttcaacatgcatttggaagagatatctacaaaatttaaacaccaataggtttccaattaagtacagacggtatataatactgaaatgtgtaaatatcacagaaaaaaaacaatacttattttcaacttcccaaacgtgagcttcaaagtttaggaacacaaaaggagtaagattctttaataaataaagggcgattacatgtgcttcaaatcatttctatggaagcctatttccaatatcatgacaaaacactgacagggcacaaacacgtgtgagtctaaagaaaggagtgtttttccactgtgaccctaaagtgtgtcacactgtgcaaaatacatatcactgtcacatcagagaaaaatatatattctccatatttacagcgtatttagggtatacaaataaatgctaaagaaccacacaatatactatattggtaaataatccacaacaagctcttgtaagaataaccaaaattagtggaaattctctattgtcaaacaatcacagcactgacaagataacagaagattacaaaaattagccaggtgtggtggccagcacctgtactcccagctactccagaggctgcgtcacaagtattgcattaagctaaaaggcaaaggttgcagttagctaagattgcatcactccactccagccttggtgcaaaatgagactccatctcaaaaaaaaaaaaaaaaaaaaaaaaaaagacatggcatggtggcttgtgactctaatcccagtaactccggaggccgaggaaggtggatcacctcaggtcaggagttcaaccagcctggccaatgtggtgaaaccccgtcgctactaaagacacaaaaagtagctggtatggtcacaggcacctgtaatcccagctccttgggaggctgaggtatgataatcgcttgaactcgggaggcaaagattgtggtgagttgagattgtgtcactttgctccaccctggacaacagagtgagactctgtctcaaaaaaaaaaaaaaaaaaaaagaaaatgttaataccatatttttctgaataactgttacaaaattacctatatccatgtggaacagttatgttgtgactttttaaaaaattttttgtatttttgtttttttgagatagagtctcactctgtcacccaggctggaatgcgatggcacgatcttggctcactgcaacctccacctcctgggttcatgctagtctcttgccttaggtcctgagcacctgggattacaggcatgtgccaccatgcccagctaatttttgtatttttagtagaaatcaggtttcaccatgttggccaggctggtctcgaactcctgacctcaggtgatccacatgtcttggcctccaaaagtcctgggattacaggtgtgagccactgcaccctgtggcactttctgacattaatggggggagtgtgtccgttatattgcataccacataccgaacactcatatataaattcataaaaatcaattaatcaaatattgcaacccatgataaaacaagcaagaaaataataagtacatttatacagactgaagaattctaaacaattccctcttaagaaaaaagccaaaacttgtacttatcaccagcacacagtgtaagaactgaaatagatgttaagatcactaccttctgatatatgaggtcaagaaaatacacagctttaccaggaacaagaattgactagcggccgggtgcagtggcacatgcctgtaatcccagcattttggtaggctgaggtgggtgaatcatgaagtcaggagttgaagaccagcctggacaacatggcgacacaccatctctactaaaactacaaaaaaatcagccaggcatgaaggaagacgcctgtaatcccagctacttgggaatctgaggcaggaaacatttgaacccaggaggcggaggttgcagtgagacgagatcatgccactgcactccagcctcagtgacaggatgagactttgtctcaaagaaataaaataagataaataactacttctcaaataagctttggtagatgtggtattctctaagaggatgtccctgcagatgcagacattgagagaatttagtcatgggtgttgactactcgtgaataggactagtgcatttataaagggacattaaagaggtccttgcctgttcctctttccaccgtattaggacacagcaggaagatggctgggctaaaccatgaagaatgctctcaccaggaagcaatttggctggcaccttgctcttggatttcccacttcccaaattcattagaaataaatttctgtctcttaagcctgccagtttaagctacatccttttttgtttgtttttgagatggagtcacgctctatcacccaggatgcagtgtagtggcatgattctcctacctcaagtgattctccctcctcagcccagggtctcactctgttgccaagtctggagtgcagtggcatgatcttggctcactgcaacctccacctccagggttctagtgattctcctgcttcaacctcccaagtagctgggattacaggtgcacaccaccatgcacagctaatttttgcatttttagtagagatggggtttcaccatgttggctaggcttgtctctaactcctgacctcaagtgatcaacctgttgcagcctcccaaagtgctgggattagaggggtgagccaccgcggccagccagtctaagctatttctagcaggacagtgaaatgacagagacaggaacaggagcatctcatcatcaacatcaccaagggctgacaaatcttattaaacaaaggaagttaagagtctgtactgtaaaacttgcaatacttgaagccatctactagcactaacatgttttaaaaaccttgagacaggcaaagtgtggtggctcatgccagtaatcccagcattttgggaggctgaggcgggaggatcaccaggtcaggagattgagaccatcctggctaacaagctgaaactccgtctctactaaaaaaatacaaaaaattagcctggcatgttggcactcacctgtagtcccaggtacttggaaggctgaggcaggagaattgcttgaacctgggaagtggaggttgcagtgagcggagatgacaccactgtactttagccgggatgacagaccaaaactctgtctcagagaaaaaaaaaagaaatgaaagaaggctaaagagtaactccaaccaacaagcctatataaagttctccagacagggtgcggtggctcacgcctgtaaacccagcactttgggaggctgaggcgggcggatcaccaggtcaggagatcgagaccatcctggcaaaccaacatggtgaaaccccatctctactaaaaatacaaaaattagctgggtatagtggtgcaggcctgtagtcgcagctactggagaggctgaggaaggagaactgcttgaacccagaaggtggaggttacagtgagctgagatcacaccactgcactccagcccgggcaagagagtgagactccatctcaaaaaactaactaactaactaactaaataaataaagttctccagtaaaggtaaataaaaaaacagtctaggtgtggtcgttcattcctgtaatcccagcactttgggaggatgagtcaggcagataacctgaggttgggagttcgagatcagcctggccaacaaggaaaaaccctgtctctactaaaacacaaaattagatggctgtggtggcgcatgcctgtaatcccagctactcaggaggctgaggcaggagaatcagttgtacccgagacgcagagtttggagtgagctgagatcgcagcattgtacttcagcctgggtgacaagaacaaaactctatctcataaatacataaggtaattaattaataaaaggacagatacagaaactggcatatgtataccttttcttcataactaaacttttttcatattatttgaaataaaaggcatgaaaaacactgtacatatatgttaacggaaatgcaacatacacagaaataattctgacataaataaaaaaattctagtggagaagaagtagtttttgcaggttatggatttttatttttttctgtctcccaggctggagtgcgatggtgtgttatcagctcaccgcaacctctgcctcccggattcaagtgactatcctgcctcagcctcctgagaagctgggattacagccacccaccaccgcacctggctaacttttgtaattttagtagagttgcagttttcacatgttagccaggctggttttgaaatcctgacctcaggtgatctgctcaactcggcctccgaaagtgctaggattacaggtgtcagccactgcacacgttcaggttatggaaattttaagttttgttattatgctataactttaagatgtttaacatacctgcaacaataacctctgcccaaatatctgtacaacacacttcacttctacgtactgaaaggaatggacactaatgttgttatattcacactggaatcatgcttaaaccacttatatgtttacaaagaactaaaagaccaaactatttaaaatagtaacaatggttaggcatggcagcttacatctgtaatctcagcactttgggaatccgaggcaggtggatcacttgagatgaggagtttgagaccagcctgaccaacatggtgaaacccccctctactaaaaacacaaaaattagctgtgcatggtggtgtgcgcctgcagttccagctactcaggaatctggggaacaagaatcctttgagcccgggaggcggaggctgcagttagccaagatcatatcactgcactgtagcctgggtgacagagtgagactctgtcataaaaaaaagaaagaaagaaagtaagagcagagagataagtgggtgcaaagaaagtgtggggaaaagagagttcagattgttactgtgtctatgtagaaaaggaagacataagaaactccattttgatctatattaagaaaaattgtttcgctttgagatgctgttaacctgtaactttagccccaaccctgtgctcacagaaacatgtgctgtattgaatcaaggtttaatggatttagggctgtgcagggtgtgccttgttaacaatatgtttgcaggcagtatgcttggtaaaagtcatgccattctccattctcagttaaccagggacacaatgcactgcggaaagccgcagggacctctgccctagaaagcctgggtattgtccaagtttccccccactgagacagcctgagatatggcctcatgggaaaggaaagaccttacatccccccgcctgacacctgtaaagagcctgtgctgaggaggagtagtgaaagagggaggcctctttgcagttgagataaaaggaaggcttctgtctcctgttcatccctgggaatggaatgtctcggtgtaaagccgaccattcccattcattctcttctgagataggaggaaagcaccccatggctggaggcgagatatgctggcagcaatactgctctgttactctttcctacactgagatgtttgtgtgaagagaaacataaatctagcctacgtgcacatccagacacagtacctttccttgaacttattcatgatacaaattcctttgctcacatgtttccctgctgaccttctccccacctgttgccctgctacactccccttgctaagatagtaaaaataatgatcaataaatactgagggaactcaagagactggcaccgatgcaggttctcgcatgctgagtgtgctagccccatgggcccactgttctttctctaaactttgtctctgtgtcttatttcttttctgagtttctcatcccacctgacgagaaatacccacaggtatggaggggctggcgcccttcagaaagatgtccattcagagatgtgaaaaattaaactttccttttcccacagaattctcccacttgcagagtttcctcacacactatttgaaggtggaacttccactctgcccatctgagctcttacctgcatttacacctgtaatacattcccacccatctggattttttttgctattttcacttcactctccacagtccagggcttttcctttgctccaatatggagataacaggtcagaaagagactcctgcttataaaaagcaaggaccataaagtgctggagctttcgtagagtcccagccctaggtttcagtaggaaagaagacattaccaaaggatctaggaaaacagttcacaaattgctccacctactgcctccttctgaatgctgagggagcactgtaatatgtaatatgtggacatcaagctctcttccaagaatactgagtcaaaagcataggagaagcaaacaggaaactggatatctttaaagtctgccataaggttttgtttttgttttttgagacagagtcttgctctgtcacccaggctggagtgcagcagtgtgttctccactcactgcaaccttggcctcctgggtttaagtgattctctttactcagcctctctaggagctgggattacacgtacgtgccaccacacccagctaatttttgtatttttagtagagaaggggtttctccatgttgatcatgctggtctcgaactcctcacccatagtgatccacatgccttggcctcccaaggtactgggatgacaggtgtgagccaccacgaccaggctgccataaggttttatgcttactttacttctggaacccccactgagctatcatgaagaatgcagaacatctaaacaaaggggacagtgaaagtccagatgctacatcatgaagcttttcatttcaaaatcaatatggcttccattttagtcaaggaacaatggggttcctaagagacaataagagaaaatgcaaaaatacacaagggcacatccccaggagggaagttatcctcacccagggagacgaggttcctataattctccagcatcacgtccctgtataaagtcctctgagcagggtccaggcatttccactcctcctgagagaattctatggccacgtccctgaatgtcaatagaccctgaaatgaaaacacattttaaccaaatggttatgggaggagatcttatctttacaaaaaatgagaggaggagagaggggaaagcatggatttaactgtagagaatgttctgacaaatccaaataagggatttctcactacatgatgtctccccagatgtattttattacactttttgagtattatcaagacatactctcagtataaatttcttatgtttgtgaaaaataacagaaataaacaaataaaaaatcaatgtagggttcctgttataaaaatgtttgaaacttttatagacacaccaagtgacattcattatctagatgagacagagcacaactgatatcttaaaagatgacaacgtccacagtaaaagataggctgggcacagtgacacatgtctgtaatcccagctatgcaggaagctgaggcaggagaatcacttgatcctggaaggcacaggttgcagtgatcccagatcgcatcactgcactccagcctgggcaacagaaactccatctcaaaaaaaaaaaaaaaaaaattagccaggtgtgacggcaagcacctgtggtcccagctacttggaagggtaaagaggtaggatggcttgaccctgagggtggaggttgcagtgagctgcaatcccgccagggcactcaagcctgggcaacaaagcaagaccccgtctcaaaataaaataaaataaatgaaaacaaaattactcaaagtacaaaaatcaatcgtgtatatatatgttcacaaaataataaaacctacagagactcacaaaacactagatgtgaatacaaagggttgtcatttgtcccagattttcaaaatacaaaagattttcaaaatatatacatatgtgtatatatgtatttatatgtatatgtgtgtgcatgtgtgtggggatgtgtatgtacatatataaagtttttaaaaatataaaaagtagcaagttttgtttaatgaaagaggaatctcatcttgctggaaaaggatactttggcagttgtgggcagggggaatcttgtcagatctaagaatatggaaatgccccatcctagaagcagtaatcaccctttcaactgcctgacctggaggaatcttcagatatctgtagtaatgcgggtgtgcacagaggcagccactatggcactctttatacagggaaaaatcgcaaaggacccacgtgttgtcattcagccaatttccaatgcagatgtcaaaaagcaagctagccatgttcactaacatgacaacatgtaaattcacaattagcaaaatcaaatatcaaagtaaaatatttactgggacacaaagaagaaaacaacagacactgcagtctacttgagggtggagcggggaggaaggagaggagcacaaaaaataactattatgggccgggcgcggtggctcacgcctgtaatcccagcactttgggaggccgaggtgggcggatcacgaggtcaggagatcgagaccatcctggctaacacggtgaaaccccatctctactaaaaatacaaaaaattagccgggcgtggtggcgggcgcctgtagtcccagctactcgggaggctgaggcaggagaatggcgtgaacccgggaggtggagcttgcagtgagccgagatcgcgccactgcactccagcctgggcgacagagcgagactccgtcttgaaaataaaaataataataaatatatatatatatacacacacacatcatgtgatgataaatataacaatatatatttaataataattggtggggctgggtatggtgactcgtgtctgtaatcccagaattctgtgcgactgaagcagacagatcacctgaggtcgggagttcaagaccagcatggccaaaatggtgaaacactgtctcttctaaaaatacaaaaaaaattagccacgggtgatggcacgtgactataatcccagctacctgaaaggctaaaacaggagaatcactggaacttgggaggcagaggttgcagtgatctgagatcgtgccactgcactccagcctgggcaactgagaatttgtctcaaaaagaaacaaacaaacaaaaaagctgggtgaggtggctcacgcctgtactttcaacactttaggaggctgaggtgggcatatcacgaggttaggaaatggaaaccatcttggctaaaaaggtgaaaccctgtcgctactgaaaataccaaaaaattattcaggtgtggtggcactcgcctgtattcccagctactcaggagcctgaggcaggaaaactgcttgaactgggaaggcagaggttgcagtgagccgagaacaccactgaactccagcctgggctgcagagcaagatttcgctcaaaaaataaaaattaaaattaatcaggcatggtggcacccacctgtggtccctgctacctcagaggcagaggtcaggatggcttcttgagcctgagggtggaggttgcagtgcgctaagatcacgccactgcactccagcctgggcaacagagtgagaccttctctcaaaatgaaataaaatatatgaaaacagaattactcaaagtacaaaaatctgttttgtatatatatgcccaaaaaataataaaacctacacagactcacaagaaattagatgttaagaaaaagggttgtcattttccccagattttcaaaatatatgtgtttgtatatatgcatgtatatgtatagatgtgtgtgtatgtatgtatgtatatatttatttatatataaaggttttaaaaatacaaaagtagcaagatttgtttaactgaagaggaatctcgccttgggggaaaggatactttggcagtgggaggaaagagaggagcagaaaaaataactatcgggcccgggcacagtggctcacacttgtaatctcagcactttgggaggctgaggcaggtggatcacctgaggacaggaattcaacaccagcctggccaacatggtgaaactctgtctttactaaaaatacaaaaattagccaggcatggtggctggcacctgtaatcccagctacttgagagtctgaggcaggagactcacttgaacccaggaggcagaggtttcagtgagccgagatcatgccattatactccaacctgggcaacaagagcaaaactcagtctcaaaaaaataaatttttacaaaaataacagccaggcatggtggctcacgcctgtaatctcaacacttttggaggttgaggcaggtggatcacgaggtcaggcattcaataccaacctggccaaggtggtgaaacaccgtctctagtaaaaatacaaaaaaaattagctgggcatggtggcgggtgcctgcaatcccagctattcaggaggctgaggcagagaaatgcttgaacccaagaggcggatgttgcagtgagccgagatcacaccactgcactccagcctgggtgacagagtgagactccatctcaaaaaaaataaataaagcaaataaaacaaaaataactattgggtactggacttgataccggagtgatgaaataattggtacaacaaactccaatgacgtgagtttacctctgtaacaagccttcacacatagccccaaaagtaaagtaaaaaaatatataaaatttttttttaatttacaatggaatttttttttttaagatggagtcttcctctgttgcccaggctggagtgcagtggtgcaatctcagctcactgcaagctctgcctccgaggttcaagtcattctcctgcctcagcctcccaagtagctgggactacaggtgcccaccaccacacccggctaattttttgtattttttaatagagacagggtttcaccatgttagccaggatgatcttgatctcctgaccttgtgatccacccacctcagcctcccaaagtgctgggattacaggtgtgagccaccgcgcgtggcccagaattttttttaaagtctcataacgatgcagaaatacacgtgtacgagacttgctctgacagctaacacagaactgacaggagtggctccccagtgaggctggaaggagggtggaggatgtgacagggaaaggagatgtcttatggccaagggtctaagctgcagctttgcttggagttttaccacaaaacaaatatatatatcatgtgatggtgaaatataaccatttatatttaataataactggtggggctgggcatgatggcttgcgcttgtaatcccaacacactggggggccgaggcgggcagaccacctgaggttaggaggttgaggccagcctggccagcatgctgaaacgctgtttctactaaaaatacaaaaaaattagctgggcgtggtggtgcacacctataaccccagctactaggtgggctgaggcaggagaatcacttgaacccaggaggcggaggttgcggtgagttgagatcgcgccattgcactccagcctgggtaacagagcgaaactccatctcaaaaaataataataatgaaggaatgattcatgaattattcatgtctatgtatgaactttccattctaattagtaagatttttggagtcagaaacacagtaactcactccattacctaaaaatgtggtataaaatcagggagaaaagattttcccttattggtctccttttctagaacttaccacgtacttcgtgcatattaatacgtgactcccattggcagctgctccaatcctggtccacagtgagctgacagtgcatccagatgtggcccctgaacaatccctgctgcccaagagcactgacaccacaggaccctcaccccgtgtccatccatgtcggggtgtgagcccttcccaggacctgcccagtgcagcctcttcccaagttcatgacactgggtcacgagagacggaacctaagcgagatgagagggactgaaggaaggcataagtgagggtgagcaaacatgtcaggcaggtcattcagacccagacattcccaactccaaggcccagggtatctgaaaggaaggagacagaacaatccaccgaggatatcatctcacctgaggaagagccatccctgactcctttgctttcctcttcctcttctgggtttctttctcacgtaccaacagtctttagaagtcaatcctgaatgttaaaaatatgttgtttatcactcagaatcaacacaccccctcccttaacacaatgacacaaacataggagacctcaccctgggaaatacggtcccctctgctgcccactgcacaatgaacaaaaaattcctacaggaaaactcccactctcctcctggagaagcccacacacacgctgcagcagtggggagctgggctgggatgagctccccttcaggaaatctctaccaaaaatacaaaaacttagccaggtatggtggtacgcatctgtgtgtctgtggtcccagctacttaggaagctgatgtggaagcatcatttgagctcaaaagtttgagactagcctggccaacatggtgaaagcctgtctctactaaaaatacaaaaattgggccgggcacattggctcatgcctgtaatactagcactctgaaaggccaaggtgggtggattacttgaggtcaggagttcaagagcagcctggccaacatggtgacaccctgtctctactaaaaatacaaaaagtagccgagattggtgggtatctctaatcccagctactcgggaggctgaggtaggagaactgcttgaacctgcgcgacccgagatcgcgccactgcactcctgcctgggtgacagagtaagactcaaaaataaaataaaatacaaatacaaaattagcagggtgtggtggcacacacctgtaatcttagctacttgggaggctgaggcacaagaattgcttgaacccaggagatacaggttgcagtgagccaagatcacaagactgcactcacagcccggaggacagagtgagagtctgtttgaaaaaaaaaaaaaaagtgcatttctgatgggattgacacagagataagaagacttgagtaatgccatagacactgatgggtagagggaacttcagatgggggtgggagggcatgggagacagctctgagcctagacctgaaggagaaagggacagtgccatcttcatttagaaacattgaataagagcagggacaacaacctgagacaggaaggattttgatgtttgaaaaaagagaaaagcaaatgtgactggggcagagggagtcagatgagggtaagctcccaggaggaggctggacactggcagggaccctgaacacagggctgtggagccaaagtgaagagtcgggcttttgtcctggggaacacgggaagcaggtggagggttccctgccaggcactgacatgacctgctttagatgtagctgtgatattctaatacagacaaaggcctccaaagatcctctctgtttctgagtctaccgctctgtttcttccattcttctgcttttttttttttcatttttggggtactgcatcccactgaaaattctaattacaactgggcactctcctctaccagaaaaaaagccacacccagacaccgcctctattttgccaatcatttcaggggtcaggatcactcaggttgagcttttctggtctagcccttcgtcgcaaagatgcagggaggttcactggggctcagagctggaaacattttcacgaagttaccctgagaaggtctgagatgagtgagaaggtgtgcctgaattcttacatgggggcctggaagggctaatgggatgggttggtcttatcatcccattcttaaaattagagaagcatttttcacatgcctgggttaaagaaaattcttttgaaaggttctgatgaaattgactcccaacattgaattcttccttacaagaaaatcacactaacatttataaaatgcagcagtgtaaacacacagctcttgaccttgaaaacagggaaacagggtcagctgtagaaccaagacataagcaaattatttcaatcaagaaatacatgggtggacagctgaggtggttcacacctgtaattccagcactttgggaggtggaggtgggtggattacctgaggtcaggagtttgagaccaacctggccaacatggtgaaaccctatctctactagaaatacaaaaattagctgggctccatccttgcaacttatttaacctcctgttggtccttctccccaatctttagatcgtcctcaatctccatagatttctgcctcttctcccatctatgcgcctcctctgctctccctgttaaattctctcttctctgttataaccccctggacccaatctggcaccccagatccccaggtgtcctccccgctgtgcttctccctctgttctccttgccaccagcaccactctgctctgtctgacccggctccacatccctcctcctctccctcactctgatgagcctccacatttctgcccctctccctaccttgctgtccttcatctctctgtacatctagcttttctctacatttctccagttgcttttctcctcctgctttcttatcttttatcacttttgctgtctcttggcaaatccctcacccatcctctactttgccatctgttatgggtctttctcattcttcttttctctgtctcaggttttctactgctctctcagtccctctctctgtctcctgatccctttggcccacacgatcacaagagggtttggagtaagacgcctgcatctcggagaagcgcattttccaagtgctggagctgggcgggcaagaacaccccgcgtcacaggacaagccccaggcacctctccaacgagggctcaggggacgcggtgactgcggaggggagatctggggagcagcagggcccagcaagaggaggagggaggtggggagcgacgacgccttcggacaagggtgggatccgcaggatcccaggaccacagaacgcagccttcccgggactggggtcgccgcgctgtgctccaggaacccaggagagtaaggctgggaggcgcacagggtgggaatacacctctagggtgaggactttaaaaagagccgtgcggaaggagtcaaaaaacggttttgagcaggaaaactacgcgataggaaacgtatacattgccctatggcagaaagacccgggacgggaccagcctcagggcgactttaaacctaaaaagaaggggcttccggactcccagtagaacatctccatttgctctgagtgaaggaagaaaggcgagaacttccaggtctatggggaccccacatcccatgtacagaagtgccggggacctgggaagctcagacttaacaccacacagagcaaaactcaccgcccgccgcggcgtgaccgtcattccacgggatccacttcctggtctgcgcgaatctgcgcgcgcaggacagaaaccaggcctgggtggagccaacgaggaggcgagcggggcccgggtgaggtgtgggcggggcgcgaagcggcgagaccttgccctttagaacccgcagagggcggggccggagcgggacctgtgcatctctcagcctcctcccaacccgttctccgggttttggcggcgagagcccccaggaaggcagacggataattcaaaagccctggaatagtctggaaggaggatgcaaactagaatgtaaaatgcaaagccctttctgggcggaacgtaggatttcatgctgatggcccacaggacagtatagaaatcttctccctttctattctccattcactcaggagggagagtccacccagtgctcagcttcagagacatccctagggccacagcctgggatgccagacggagtgctcaggccagggaggagtgaggtcaccacctgctgcttaaacacagcagggatgcgggcgtgggagcctgaggtcccagctactcaggaagcagcggcgggaggatcgctcagcctgggggtccaggacagcctgcgcgacaatgtaacattccctcccgcagtctctctcttttttaaatttttaaaataaaatttttattaggccgggcacggtgactcacgcctgtaatcccagcactttgggaggctgaggcgggcggatcacgaggtcaggagatcgcgaccatcctggcttacacgatgaaaccccgtctccactaaaaatacaaaaattagccgggcgtggtggcgggcgcctgtagtcccagctactcaggaggctgaggcaggagaatgcggtgaacatgggaggtggagcttgcagtgggccgagaccgagccactgcactccagcctgggcgacagagccagactccctctctaaaaataaataaacaaactaaatttgcttgtgtgagataggaatacaacattactcttctccatatggatatccagttagttgtcccagcacatttgtaaaagagatctgttactttctcctttttatttacattttttctttttcttcttcttcttctttttttttttttttttgagactgagtatttctctgtcgcccaggctggagtacaatggtgacatctcggctcactgcagcctctgcctcctgggttgaagcgattcttctgcctcagcctccggagtagctggcattacaggcacacccaccatgcccggctaatttttgtattttgggtacagacggggtttcatcatgttggacaggctggtctcgaactcctgacttcaagtgatccgcctgcctcggcctcccgaagttctgggattacaggcgtgagccactgtgcctggcccaagaaatactctttacttcgctttttaaatgttgaaaaaatacaattgaaaactaaaaaatcttccccaaaatgagaaatcatcttcatgacaaaacaggaagaaataaaaaccattttattagtaaataagccttagaccagaatgtgttgggaaatacaggcaaagagctgagaggttgaaaagagagaaacttcactgctctatacaacccattaagtacatgttttcaagataaacactaatcagtcctcagggaagaggacttgacaagtctttggtcgcacatagttcatcctggctctacttggtaatggaggtgaccatctgtgtcagctaactagcttcatgcagaaggaggggaaatacattaacccacgtctttttgacaagtgtgagttttacgacatggcgacaggtgccctctctagtgaggctcctacaatctgacggaaactgacgtcagcagtaaataataaaattcagaatacacgattaattatagagtttattggaacacaaagtttgaggatagccatctggaaacatcaactccaaatgaagggggcccgtgttcccatgtagagatgttaaggtttcacacacagggaaagacagagaagctttagcagaatcaacacattttccattcaagaccagtgcataggctgcggcagcttgactggtgatggattgatacacttcaaggaaggttactttatcactccgtaagaagggacaatgatgccaaaaggtcttatctctggggctgggtagtcttcctacttacaggtaaactgtttttttttaaattgatattaggaaactaaattttattgcactacacgctaccagttacaaagtagggtgtcctcataaacaaaggaaatgcctcctctttaagtttttctttcttttttttttttttttgagacggtgtatcgctctgtcacccaggctggaatgcagtggcgcaatatccgctcactgcaagctccgcctcccgggttcacgccattctcctgcctcagcctccagagtagctgggactacaggcgcccgccaccacgcccggctaatttttggaatttttagtagagacggggtttcaccgtgttagccaggatggtctcgatctcctgaccttgtgatgctcccgcctcggcctcccaaagtgctgggattacaggcgtgagccactgcacctggcctgtttttcttacataggcgcctaggtaaaaactaagatatgtctacctgccggtctgctgacagtctaacaaaacttattattttgttgatttaaagctatccttaggcggtcccggtggctcactcctgcaatactagcaatttgaaaggctgtaccagggggatcacctgaggtaaggagttccagaccagtctggacaacatggtgaaagccagtctttactgaaaatgcaacaattagccaggcctgggggcacatgtctgtaatcctagctcctcaggatgctgaggaagtagaatcgcttgaacttgggaggcgggggttgcagtgagccaagattgtgccattgcactccagcctggatgacaagagtgaaacggcatcaaaaaaaaaaaaagaaaaagaaaaaaaagctattcttggtattttagtgtgcaagtacttgaaagcatgactgtaattattttagaagcatagattgtcatgggatattgagtcatctggacattgtttttctgtaggagtttgttcttgcaggtactattaagctgctttccttaactgtaaacatcttaagatcatgactcatgcgtgagcagtaaggactacgtcttgctagttttagtagactaaaactttgtcattctagctctcctaggatcctgtttaacagtttttccactcatgcaccacagcgttctaagcacaattatggagacaccactcttttgtaatgcactgacaccatgtcactgcactttagtctgggcgacagagtgagattccgtcaaaaacaaacaaacaaacaaacaaacaaaacaaaaacgaaaactcatccaaatcagaaagaaagaaataaaattgtatttgtttgtagatgacatgatcttctgtggaaaaaatccaaagagtcaaccaaaatactactggaactaataaacacattcagtggatttgcagaatacaatatcagcagcaaaaattagttgaatttccatacattaacaataaacaattttaaaagaaaattaagaaaaccgttccatttgctagagaaatttaagtaagaaatactaaggaataaatgtaaagaggtgagacgtttgtaccttgaaatccacaaacactgatcaaaatgattaaaaacatatataaatagagatagaacccatattgatggattggaaaaattaatattgctaaatgattatataacctaatgtgatttagattcaacacggtacccataaaaatccctatcagattgtgttaaagaaacaaaaaactggctgggaaaagtggcacacgtctgttggccaggctgatctcaaactcctgacctcaagggatctaactgccttggcctcccaaagtgctgggattacaggcatgagccaccgtgcctggcccaatcctcttaacataaacactttaacatcaattaatgcttgaactcaatgttaaatcaactcaaactcaagtcaatgctgaattgactctaatgacaattaatgcttgatggtttgctatactcattgcctgtgcatcaattatctcaaaaatgaattttctgatgttctgcaaggagtgacctcagactgaaaccttgtcacacttatgacatttgtaagatttctgtccagtagggattctctgatgcctaatgacttgtgaacgtgaagtaaagactttgccataattatcacacctgtgaggtttctctcctgtatgaattctcctatgttttgcctaggatgaagcttgactgaagaccttgcctcaatcatgacatttgtaaggtttctctccagtatgagttcgctgatgaactgcaagttatgaacgatgtctgaaaactttgccacatttattaacacttgtaagatctctcttcattacggattctccaatgatttgcaacagttctagcattaccaaaggcattgtgacaatcattgcattagtaaactttccctacaccatggattgcctgatggatggtgagtaagtggtgattgcccactaaaggctttgccacactcattacacttgtaaggtttctctccagggtgaattctagtatgtcctgcaaggtgtgaatcacacccaaaatccttatcacaaaccttacatttgtatggtttctctccagtatgaattcacctatgtctttcaagctgtgatttacgactgaaaactttgtcacaggtttttctccagtatgagttcactgatgaactgcaaggtatgaatgatgactgtaaaattggccacatttatcacacttgtaagatctctcttcattataggttctccaatgatttgcaagtgttgtagttttactggagactttgtggcagtcattacatctgtgagctttcactataccatggattgcttgatggtgaataggcgatgccctcaccctaaaggctttgccacactcattacacttgtaaggtttctctccagtgtgaatttcagtatgttctgcaaggagtgaattgagcccaaaaaccttttcacaaaccttacatttgtatggcttctccagtgtgaattctcctatgcattgcaaggtgtgatctgcaactgaaaacgttgtcacattctttacatttgtaaggtttctctccagtatgaattgccttgtgaacaaaattacaacaaattagctgggtatggtggattccgcctgtagtctcagctgttctggaccctgaggcaggggaattgcttgaacccaaggcagagattgcagtgagctgagatcgcactgctgaaaagacacaaacaagttgaaagccactgtgactcggctcattgcaaactgcctcctgggctcaagcgattctcctgcctcaacctttcgagtagctgggactgcaggtgcacaccaccatgcctggctaagttttgtatttttagtagagacagggttttgtgatgctggccagactggtctcgaactccttactgcaaaaaaatgaatatataatacatagaagtatatgtatttctatgaaatatataacacatagaaatgaataagttgaaagcctctgtgtcttaaacaaatgacagtagaactaaaatatgggaaggtcgggcatggtggttcacacctgtaatcccagcactttggaagtccaaggcaggtggatcacgaggtcaggagttcaagaccattgtggccaacatggtgaaaacctgtctctactaaaaatacaaaaattagctgggcatggtggcatgtgcctgcaatcccagctactcaggagactgaggcaggagaattgcttgaactgggacctgggaggcagaggttgcagtgagccgagatggtgccactgcactccagcctgggctacagagcaagactccatctcaaaaaaggaaaaaaaaaaaaaaagaactaaaatatgggaatctcattcaacctcacaagctccctcaataagaatgatgaaaagtgtaactgttacagggttgatcccacaacaaactgaacaaagcttttcttgttaaaaatgaacaatgccaggtgcggtggctcaagcctgtaatcccagcactttagaggccgaggcgggtgggtatggaggtcaggagttcgagacgagcctggccaacatggcaaaaccctatctccactaaagatacaaaataacatgctgggcatggtggcacgtgcctggaatcccagctgtgtacatcaaaagcacgtatggggcaaaatcacaaaagagaatacaaaaccaggaaaagccaagatacacaaggacagattcttcatgtctggaggaacattttcctcacccacagactccaggttcctgtagttctcccacatcacagccctgtataaagcgttctgtgcagggtccaggcgtttccactccagcaaagagaactctatagccacatctctgaaagtcaagtatccctaaaatgagaaacacgtttaaataaaacattatggaggcgttatcaccttcacacgaaatgagaaatgggaaattaagtatcgattgggccaaagaatatgttctgacaaacccgtattaaggtatttttgaacatcttttctctatcgttgcattttattgtacttttccatgagagatttcaagatcccctaagtaaaaaatttacaaataaaaactaaatatagtgttttctctataaatacgttagatattatgttcagcctaacacttgatattcattatctggatgagctaaaatacaagtgcagtctcagagatgacaaagtccagtggcctaaagaaaagaaagtcagggccagccatagtggctcaagcgtgtaatcccagcacgttgagaagtggagggaggcagatcacaaggtcaagagtttgagatcagcctgaacaacatggtgaaaactcctcttctcccaggaggcagaggatgcagtgagccaagataacatcagtgcactatagctggagcaacagagagacactccatctcaataaaataaaaataaaaattggccaggtgcggtggctcacgctttcaatctcagcactttgggaggccgaggcaggcagatcatgatgtcaggagatcgagaccatcctggctaacacagtgaaatcccgtctctactaaaagtacaaaaaattagccaggcgtggtggcaggcacctgtagtcccagctactcaggaggctgaggcagaagaatggtgtgaacctgggaggtagagcttgcagtgagccgagatcgggccactacacgccagcctgggtgatagagcgagactccttctcaaaaataaaaaataaaatttttaaaaaggtggggcacagtggctcatgcctgcaatcctggcactttgggaggcagaggtgggcagatcacctgaggtcaggagttggagaccagcctggtcaaagtgatgaaacaacgtcgctactaaaaatacaaaaatgagctgggtgtggtcgtgggcacctgtaatcccagctactggggagcctgaggcagaagaatcgcttgaacccagaaggcagaggttgcagcaagctgagatcgtgctactggactccagactgggtgagaagaacggtaccccatttcaaatatatatatatggtctggagggacattttcctcacccacagactccaggttcctgtagttctcccaaatcacggccctgtataaagcgttctgtgcagggtccaggctttatatatatatatatatgtaatacatatatatatattacatatatatataatacatatatattatacatatatatttatatattatacatatatatttatatatgattatacatatatatttatatgatcatacatatatatttatatgattatacatatatttatatatgagattatacatatatatttatatatgattatacatatatatttatatatgattatacatatatattatatgattatacatatatattatacatatatttatatatgattatacacatatttatatatatgattatacacatatatttatatatatgattatacacatatatttatatatatgattatacacatatatttatatatatgattatacacatatatttatatatgattatacacatatatttatatattatacatatatatttatatattatacatatatttatatatatgattatacacatatatttatatatgattatacacatatatttatatattatacatatatatttatatattatacatatatttatatatatgattatacatatatatttatatattatacatatttatatatatgattatacatatatatgattatacatatatttatatatatgattatacatatatttatatatgtatgattatacatatatttatatatgtatgattatacatatatttatatatgtatgattatacatatatttatatatatgattatacatatatttatatatatgattatacatatatttatatatatgattatacatatatatatatataaaatcataaggctggatgcagttactcatgcgctgggtgcagtgactcatgcctgtaatcccagcaatctgggaggccgaggtgggcagatcacctgaggtcagaactgtgaaacccctcctgcaggaaccctccacatacatgtagtgaagtcaacacactcagaggcagccagggtggcattcttggtaacggtgaaaaactgggaaggactcacacgtcttcattcagaaaatgctccaaggaggatgaaaaacagcaaactatcttgtttcctaccttgaaaatgtggaacattttaacacttgcaggataaaataccagaacaaaacatttatcatgtcgagctctttggctcacgcatgtaatcccagtactttgggaggccaaggagggaggatcacttgaggccaggagtttgagaccagcctggccaatatggagaaacgccatctctactaaaaatataaccattagccaagcatgatggcacatacctgtaatgcagctactcagttggccgaggctagaaaatcatttgaacccatgaagcagaggttgcaatgtgctagtaagttccagcctgttgacagggtgagacacctgtctcacaaaacatacaaaaaaaaaaaaaaaaaaaaagaaaagaaatgactaacagtgtcagacggctgaattatgatgtcacgactacagttaaataacagtcaggcaatacggcaattctatatacacatattgcccttagttatctagttcactatgcgtaagatataaaacatagaatgtgtactgggaaaattgataaactgggatcagagaaaacatagtataaaacaaatcgtataataaaaacataaaaaaagatgcaggctccctggtctggatgttcatattggccaaaagccatgtttggatttaattaattaattaattaattaatttatttatttatgtatttattttttgagatggagtctcactctgttgccaggctggagtgcagtggcatggtctcggctcactgccacctctgcctcctgggttcaagtgattctcctgcctcagcctcccaagtagctgggattaccggtacgtgccaccacccccagctaatatttgtatttttagtatagacggggtttcaccatgttggccaggctggtcttgaactcctgacctcatgatccacttgccttggcctcccaaagtgctgggattacaggcatgagccaccgtgcccagcccatatttggatttcttattctccaacaggatgttcctgcagatgtggcatttgagataatttggtcatgggtgttgactactcatgaataggaccagtgcttttatttttattttttttctttctttatttttgagaaagagtttcactcttgttgcccctgctagagtgcagtggcctgatcttggctcacagaaacatccgcctcctgggttcaagtgattctcctgtatcagcctcccgtgtagctgggatttcaggcatgtgccaccacacccagctaatttttgtatttgtagttgagatgaggttttaccatgttggccaggctggtctcgaagtcctgacctcaggtgatctgcccgtctcggccgcccaaagtactgggattacaggcttgagccaccgcacccggccattttttttgttcagtagattcaaggattcagcatgttggactgactggtctcaaactcctcacctcaagcaatctacccccatcagcctcccaaagtgctgggattagaggtgtgagccaccatggccagccagtctacgccgtttctgacaggacagtgaaatgacggagacaggaaaaggagcatgtcatcatcaacattgctgaaggctgacaactcttattacacaaaggcagtttacagcctgtcatataaaagctgcaatgtgtgaagccatctaatagcactaacttgtttaaaaacctggaggcatccaggcgcagtggctcacgcttgtaatcccaacactttggaagaccgcggtgggtggatcacctgaggtcgggagttcgagagcagtctgactgacatggaaaaaccctgtctctacttcaaatacaaaattagctgggtgtggtggtacatgcctgtaatcccagctacttgggagcctcaggcaggagaatcgctcgaacccccggggcggaggttgtggtgagctcggattgcgccactgtagtccagcctgggcaagaagagcgaaactctgtcaaaaaaaaaaaaaaatctggaggcaaattaacattatttctcaaataagttctcaaataagtacagcaggcccacagtgttcatgtacatgaccccaatttgcacatacagtaagtgagggacaaacttgattcttggcctgaaggatcccacgacatgtttctaagcaaaatagtccaccaagaaagtacagaaaacaaccagtcacaaaaaatgctgcaaggagaacagaatgaaatactacaagggggatacaagcaagggctgagctgggacacaagcgctgagctgcgctgctgacagtggttctgaagccatccctcatggatcatgtgctgagtcatgatgccctgcacacactgatttaggcagcctccaataattttgtccagtggatgaataaggtcttgacttactcagtgagagtagtgttggaggggaggggctcacggggaaattggggtgttcacttttacaaagtcaataggctggtatttgcatccagatcaatgtatcatgtgaggcaaggccaggaaaggaagggcaagggtggagagcaggaagtaatgggcatgtaggagtgaactttgtgcatgcacctctgtgggaatataattccactaggatagaccaaatcttgagcttggaagaaagtggaactaatttagcaaatggtaaaatattgacccaaggttaaatatgcaaattacaatatgggcaagggacaagaatgaaagagatccaaaaaagcagcagtatggtggcctaaggtgaaagcagttttacatctcttaaattaaatggcctctgatacctagtttcaagagtatacacaacaatataccaagtatagattccagaatttcatacacacagaaaaaaatgagtaaagtctatgaggagtgcagcagcgaaggagaccatggatgtgaagaattccctggctgagtaggtagagctgtgtttgtgaaaacagagacagactgagcgcagtggctcatgcctgtaataacaataataataataatgacaggttttttttctttttttgagatggagtgtcactcttttgcccaggctggagtgtagtggtgtgatctcggctcactgcaacccctgccacccaggttcaagcaattctcttgcctcagcctcctgagtagctgggataacaggtgcctgccaccgggcctggctaaattttctatttatttatttatgtatttatagagacagagtcttcctctctcacccaggctggaatgcaatggtgcgatctcggcacactgcaacttccgtctaatggtttcacgccattctcctgcctcagcctcctgagtagctgggactacaggcacccgccaccacatctggctaatgttttttgtatttcattagagatggggtttcaccgtgttagccaggatggtctcgatctcctgacctcgtgatccacccgcctcagcctcccaaagtgctgggattacaggtgtcagccacagcgcccatcctaaattttgtatttttagtagagacagggtttcaccattttgatcaggctggtcttgaactcctgagaacctgcctcagcctcccaaagtgctgggattacaggcatcagccaccatgcccaggcccttcttactattaactcattattgtgatagttgatgacaatgaaaaatacttaaaatagccaggtgcggtggctcacacctgtaaacccagcactttgtgaggccgaggtggatggatcacgaggtcaggagatcaagaccatcctggctaacacggtgaaacctcgtctctactaaaaatacaaaaattagctgggcatggtggcaggcacctgtagtcacagctactcaggaggctgaggcaggagaatggtgtgaacctggaggcggagcttgcagtgagccaagatcgggccactacactccagcctgggcaacagagccagactccgtctcaaaaaaaaaaaaaaaaaagaaaaatacttaagatcattacaattattataaaaaataaaacttatggcaaatgttgtgttttctacataaaccataggtttatccatccatgtatttatgcacacacatcacatcatgccattacacgtgtggtggtgcacacctctagtcccagctactcgaggtgctcaggcaaaagaatcactgtaatccaggaggcagaggctacagtgagcctaaatctcactactgtactccagcctgggcaacagagggagactcaactaaaaaaaataaaatacaatcaatgatgtgataaagcattctacaccactgatgtgtatcttcactttccattccattccaagtcattaaaaatgcagagtctagcctggcatggtggctcaggcctgtaatcccagcactttgggaggctgaggtgaaaaaacacaaggtcaggatttcccgaccagcctgaccaatatggtgaaatcccatctctactaagaatacaaaaaaattagccaggcatggtggcacatgcctgtaatcccagctactcgggaggctgaggcaggagaattgcttgaacccaggaagcagatgttgcagtcagctgacagcctgtcactgcactccagtttgggcaatagagcgagactccatctcaaaataaataaataaataaaacaattagccgcttgtggtgacacatgcctatcattcaagctctttgggaggctaaagtggggattgattgagcccaggagtttcaggctgctgtaaactctaaattgtgccattgtactccaaaactaagccacagagcgatattttctcccactctctctccaacatggtgaaaccccatctctaccaaaaatacaaaaaattagccaggcatcctggcacacatctatggtcctagctacttgggaggctgatgcaataagatcacttgagcctgggacacagaggttacagtgatccaagactttaccactgcattccaccctaagtgacagagtgacactccacttcggaaaaaaaaaattccaaaaccatcttgtatattcctgagcaaaagaaacttctttcgaggtctacggttctgatggcatcaatcccaaacatgtaattactcactcccagaaaatcacagaaatatgttcaaaatgtacacattgtgaacacatagctgcaggtgtttaaaacactgaaaaattgtgcacacatagctctaggtgcttaaaacactgaaaaagaggcagctgtagcaatgagatctgagcaaatgcttttctcatgaacacatgggctctgctaaaccaaggttccaagtcaatccagcccatccttcaacatctgcagagaatattatggaccagagggatttaaattaattatgttacaaagagaggaagcaacacgtcatcacttcatcatcacatccaatcaactcaccgctcatctgcacccagggtcccccttcgtcttcattactgtttccctccatcattctgtacatagctctcattctcaccttctctgaaattgggattagccaggtgtggtagcacctgcctgtcatcctggctccttgagaggctaatgtgggtatcacttgagcccacgaatttgaggctgctgtaaactagaattgttccattgcactccagaaagggccccaaagtgacaccctctttcttaaaaaagaaagtttggagtcagagacatattgactcactggtgtagcttcaaatccattacaaaagcagacacaaaatatctcccatagtttgtttccttttccagaatttaccagataccagtgtatattaatgtactgaagggggcctgcccctccacacctgtgggtattcctcagaaggtggagataagagactgagaaaagaaataagacacagggacaaagtatagagggagaaaagtgggtccgggggagcagcgctcagcaagtgaggacctgcaccggcatcgacctctgagttccctcagtatttattatttatttatttatttgagacagagttttgctctgtcacgcaggtggagtgcagtggcatggtttcggctcactgaaacctccgcctcccgggttcatgccattctcctgcctcagcctcccaagtagctggaactacaggtgcccaccaccgggcccggctaattttttctatttttagtagagacggggtttcaccgtgttaaccaggatggtctcaatctcctgacctcgtgatctgcctgcctcggcctcccaaattgctgggattacaggcgtgagccaccgcgcccagcctctctcagtatttattgatcactatctctactatcttggtgaggggaatgtagcaggactatagggtgatggtgaggagagggtcagcaggaaaacacgtgagcaaaggaccctgtgtcataaataagtttaaggaaatgtgctctgcctggatgtgcatgtaggccaggtttatgtttgactttacacaaacatctcagtgcagtaaagagcagtattgctgccagcatgtctcacctccagccatagggcggttttctcctatctcagtaaatagaatgtacaatcgggttttacaccgagacattccattcccagggaggagcaggagacagatgccttcctcttatctcaactgcaaagaggcctttctctttcgctaatcctcctcagcacaggcccttgtcgggctgagggacctgtaaggtctttcccttcccataaggccatatctcaggctgtctccattgggggaaacctggacaatacccaggctttcttgggcagaggtccctgcagctttctgcagtgcatttgtgtccctggttaatcaagaatggagaatggcgatgcctttcacaaagcatattgcctgcaagaactttttaaacaaagcacatcctgcacagcccgagatccattaaatcttgattcaacacagcacatgtttctgtgagcacagggttggggctaaggttacagattaacagcatctcaaagcagaacaatttttcttagtacagatcaaaatggggtttcttatatcttccttttctacatagacacagtaacaatctgatctctcttttattcccccacaacgtatgactttcatacacagtttctctgatctggtccacaaagagctaaacgtccatccagatgtggcccttgaacaaaccctgctgcccaacatcactgacaccatggggcccacaccccatttccatccatgcctggtgtgagcccttcccaggaccatgcccagtggagcctcttcccaagctcacatcactaggttataggagatggaatttaagtgaagatgacaaggactgagaaaaggcatgggtgagtgtgagcaaacgtgtgaggcaggacgcttcagactcacaggagactgactactacaatacctggcatttcagaaaggaaagagacagaagaatccaatgagaaatatcacttcacctgaggaagagccatccctggctccttttctttgccttcttggtgtcttcctcaagtaacataagtctctggaaatcaatcctgtatgtgaaaaaaatcagagatttaatgtttagaaatcactccctccttttctgtggcaaaacacacacacgggagatctcacctgggagaaagacagccctctgctgcccactacaccagagattatgcggagataagaaggtgccacaggaagacctacaagggtaattttgacccattttcagatctttctcccctcctggaaaagtccacacacacgctgcagcaggacacagaccttcaggacacagatctggccctaaccaaaccccatgcagagcacagccccctcagctccctgtggatcacaggctgatctcagctctcaacatggaggaaactgccttgattttcaatgctggagacagataaggatcaccagtgccatagtaaatattactgagggtgggtttaaatctatgataatagcaatctctgataaaacagcataaaagatgtatttgcaaaatgcctgagaaccctaatgtgaagtcagggttgagctccactcagtgggtgccagcctagcacagccccaccttctggctctgctctccacttggggactttttcccaccaggatccagtgaacagcgaaggagcaaaaagaatcacacagaacaggcaacatggatcagaggtgggggtgaaggtggggctgtcatgtcatatgggggctgtgggtgatcacaaaagtttccatagaaaaaagtgatgtcagaacaaagacttagggaagaaacgctgcttgtcacttgcagctgaggggccagagagtcctaggtagggggacagcccaggtgaaggccctgagataggagcaacctcagtcccagaaaaaggaaagaagcctgcgtggctggagcagagggagcgaggaggacacaggcaggagatgaagtcagaggggtcctgggagcccagatctgcagggatgaggccttgaaacatttttctcccacacctcaaaggaattttggaaacgatgtattttctcactcctttcatgtatacatgcaaatgtctctttacattataaatgacaacacttacaaataatgtaatttatctcccatacttaaaatacatgctgtcaagtttggctaagcttccagaaatacactgtcaccctcatctgagacatgtaggactgtaagggaatgtgtttgggggtttaggaagtcacttatggacacgtgaaggtggagatgcctgtttgatgtcccagcagagagctgaggagacaactgcacacaggattgtagagctcagtggagaggcctgcaggggacatgggtaggtgggttaaagctgtgagatgagataaggaaaagcagtgggtgtggacagagacaagaataggttcaagatgatttgagtctaatcccgtttttccattctggtatttgtgatttttacatttttggaggactggaatccatttaacattcaaattacatctgagcagtaccctctcctaaaggaaaagccacacactatttggcaaagtatttcagggctcagtgaaattccatctctaccaaaagtacaaaaaattagccaggcgtggtggtgtgcatctgtggtctcagccatttgaggggctgactgtggtggatctttgggcctgggaggcagaggttgcagtgagtcaagatggtgccactgcactcaagcatgggtgaccgagtgacactccatctcaaaaaaagaaaaaaaaaaaattccaggacaattttatacacctgagcaaatgaaatgtctctttcaatgtctaaggtcctgatggcatgaatcctaaacatgtaattattttcccagaaaaatcatagtaatatcttcaaaataaacacaattatgaatccctagctataggtgtttaaaacactgaaagagaggcagtggtacaaatgagatctgagcaaatgttttcttcatgaacacatgggctctgctggaacaaggttccaggccaatcctgtccatccttgaacatctgcaaagaatattatggaccagaggaacttgaggggaaagcttatttagcagctcacagctcaccatttaattagatgacataaagaaagaagatggaataataggctacttcaactaaattttaatgttagcataaagaaaaagttccttgatatctttatcaagtacacatcgaaacaacctaaaatcatttatcaggtactagaaaatgtttccaatgtatgatacagactagaaagcatgcagtcctcaatgtaaactaaacacaataaatttcagagaaaaacaattttaaaatggcttaaaaatatatctaatgaaatgtggggtcaaagaagaacattttgaacacataccgtagttgcaaaacaatgatgttacctcgtaagattataccaaagctttcatgagaagcagttttttatattactttaattttattttagagatggagtctcgctcttgcccagccagagtgcagttgcaggatctcagctcactgcaacctccgcctcccgaattcaagccattcttctgcctcaccctcctgaatagctgggattacaggcactcgccaccacaccaggctaatttctatattttggtcaaaacgaggattcgccatgttagccaggctgttctcaaatacttgatctcaggtgatctgcccaccttggcctcccaaagtgctgggattacaggcatgagccagagcacctggtctatttttttttttttaaattaagaaacacgttggtcatggtggctcatggctgtaatcccagcaccttgggaggccaatacggctggatcgcttgagccctggaattcaagaccagctcgggcaacatggtgaaagcccatctctactaggaacacaaaaatttgcccggtgcggtggcacctggctatggtcctagcaactttggaggctgaggtgggaggatcccttgaacccaggagattgaagcttcagtgagggctgatcctgtcaccgctctcatgcctggccaacagaatgagacccatctttaatagaaatgaagaaaaaggaaacacatgcgtcctgggtctggggacagggagagtctaaggccaattaacacgaacctcaggaggtcctgatgacgtgtgtccatggtgttgaggctgcagtttggtttcacacattttacagacacacgagacagcaatcagtacatatatacattggtccggtctggaaaggtggaataactggaattggggaccttctgggtcacaggtagataacaaataacattctttgaatctttgatcagcctttcactaaatacacaatttatatgtgagcagggaggagggataagtcacttatgccttaggctggctcagggaccctgtatttttacataaatagggcaagggaagcaatcagatagacatttgactcaggtgtgcagagggatgggctctttcccacatctgtgaagataagctctcagtttacatcgccagggtgaaattcaacagaactattttagggtggagatcttgaggttcccggtttgggaggggcatatgtagctttttaaaaaatctttgtaactatcttgtttaggaataaaatggaaggcaggtttgtctgacgcagttcccagattgacttttctctttggcttagtaatttttattttcctttcacaagcttgtgacagccataatgctttgacacactgatactgttttatatagatttttccacaacagtaaagtccaagggtctgtcatgaaccgggttagagaagatgagaaaattttcagaagactccatctcaaaaaaacaaaacaaacaaaacagaatttaaaatacagaattaagtcatttgactttttttaaatgaaaagtctcacatatttattactgaaccaagccaacaaaggtgttcataacagatccagagaaaaaaaatacattctcaataaaacatgtccaactctccagatagtggtgacattttcagcttgatatggtaacgtgactgaatcttcagacagcatgaatatgtgtgccatctcatatgcaattccttatagatccagcttggctcttctccagtgtcgtctttgacagttgtacctataaaacttatgtggatggtctgcctgccactctgtgcatcactttcttttttttttttttttttttttttttgagatggagtctcgctctgtcacccaggctggagtgcagtagcatgatctctgctcatggcaagctccacctcctcggttcatgccattctcctgcctcagcctcctgagtagctgggactacaggcgcccacaaccacgcctggctaattttttgtatttttagtagagatggggtttcaccgtgttagccaggattttctcgatctcctgacctcgtgatgctcttgcctcggcctcccaaagtgctgggattacaggtgtgagccaccacacctgtcctgtgcatcactttcaacatcatcttgtcccaacttaaaataagttttccatttacaaactggtgatttattttgggaatcgtccccataaccttttcataaagcatcaatgatttcattgtccctctacccaaactttaccagattcatttttcgatacactatctgtctctgtcacccatgctggagtacaatggcatgatcatggctccctgcagcctcgaactcctaggctcaagccatcctcccactgcagactccacagaagctgaaccagcagacatgtgccacaatgcccagctaatttatgtattttttgtagagaaggtggtttcaccattctgcccaggctggtcttgagtaccggggcccacgtgacccaactgtctcagcctctgaaaattatgggattacaggcctgagccacagcatctggtctcatcgcaaatttgatgtttcttcttgtttcagttttagcagaatttacattgccttgattgagtctcttttcaaactcatgtcttacccatctgagtgcctcaaaccaaaccctgttcagacatgttataacggatttgtatcagtttatcttggtgcaaaaaatgtgatatcatgcacaattttctcataatatgtatttttccatgaacttcctgaagaccccttgtactagcgaactgtattcaagaggttataaaaaggattgttgatatgcaagtgccacttatttctgggatgcaaaatggttcaacatagtcaagcaaatcaatgtgatataccacttgaacataatgaaagatgaaaaccacatcatctcaatacatggagaaaaagcatttcacaaaattcaacatccagtcatcatggaaatcctaaacaaaatagaaagagaaggaaatttacctcaacaatacaaagaccatccatgaaatgaccacagcagaaataaccagtcagggaaaatggaatgcttttcctgtaggatctcacatgatgcaagaatgctctcaccccttctattcaatcaatactggctgtcctagctagagcaatgaaatagcaaaagaaatcaaactcatccaaatcagaaagaaagaagtaaaactatttctttgtagatgacatgatcttctgtgtagaaaatcacaaagagtcaaccaaaatgcaactggaactaaaaaacatatgcagtggatttgaagaatagaataacagcaccaaaaattagttgaatttccatacattaacaataaacaatttaaaaagaaaattaaaaaaacactttcatttgctaaagaacttaaagtaagaaatacttaggaataaatgaaaaaagttgagaagtttctaccttcaaatctacaaacattgatcaaagtgataaaaacatgtgcaaataagagatacaagccatattgaatggaataatattgctaaatgattataactgaatgtgatgtagattcaacacaatacccagagaaatttctataactttttgttaaagaaacaaaaaacaggccaggtgtggtggctcacgcctgtaatctcagcactttggcaggtggaggcaggtggattttaaggacagaagatcgagaccatcctagctaacacggtgaaacccagtctctactaaaaatacaaaaaattacccgggcatggtggcacgcacctgtagtcccagctactcaggagactgaggcaggagaattgcatgaacctgggaggtgaatgttgcagtgaaccgagatcacatcactgcactccaacgtgggcgacagagcaagattccatcttaaaaataaataaataaataaaagaacatacaggctgggaaaagtggctcccgtctgttggccaggctggtctcaaattcatgacctcaagtgacctacctgtcttggcctctcaaagtgctgggattacaggtgtgagacaccacgcctggcccaatcctcttaacataaacagtttaatgtcgattaatgcttgaaatcaatgttaagtcaactcaaactcaggtcaatgctgatttgactctgatgtcaattaatgcttgatggtttgctatactcattgcacttgaaacaattgtctccaaaaggaattttctgatgttctgcaaggagtgacctcagactaaagaccttgccacactgatgacatttgtaagatttctgtccagtatggattctctgatgcctaataaggtgtgaaggtgaattaaaggctttaccacaatcaccacacttgtgaggtttctctcctgtatgaatcctcctatgtctttcaaggtgtgatttgcgaatgtaaactttgtcacattcttcacattcgtaaagtttctctccagtatgaagtttttgatgacatgcgaggtacgcttttgtactaaaaaccttgccacattcattacatgtgtaaggtctctctccagtatgaactctctgatgttctgcaagacgtgaatcactccggaaagccttgtcacaaaccttacatttgtatggtttctctccagtatgaatcctcctatgtctttcaagatgtgatttgcgactgaaaactttgtcgcattcttcacatctgtaaggtttctctccagtgtgaactctacgatgtcctgcaagagttgctcgttgcttaaaaaccttgccacattcattacacttatagggtttctctgcagtatgaactgccttatgaattacgaggactgaatttcgagcgaaggtcttgccacactcattacatttgtaaggtttctctccagtatgcagtctatgatggtacacaaggtgtgatgtctgactaaaggtcttgccacactcattacacttataaggtttctctccagtatgacttctatgatgacatgcaagggttgctttttgatcaaaaaccttgccacattcattacatgtgtaatgtttgtctcccctgtgaattctagtatgttttgccaggtgtgaatcatgcttaaaagccttgtcgcaaaccttacatttgtatggtttctctccagtatgaattatcctatgtatttcaagatgtgatttgcaactgaaaactttctcacattcttcacatttgtaaggtttctctccagtatgaattctcctatgtcttcgcaaatgcaaatgaaatcttgattcaagctgacctttaataggcttgtttccagcatgcctttgatcatatcggtctgtactactagtcaacttttttatttctgtcatgggtgcttcatggtcatttgtttcatcttcttgccactgaaacacaaagtcatgaatgtctttctcaatttcctgggagcaaaatgctccaatgtgataacttgcttgtctctgcaatgtccctgtgtggatcacttctgtattgccttgccctgttgatgacaatgtattcatcatgcatttggaagagatatctacaaaatataaacaccaataggtttccaattaagtacagatggtataaaacactgaaatgtataaatatcacacacacacaaaaatacttattttaaacttcccaaacatgagcttcaaagtttaggaacacaaaacaagtaagattctttaataaataaaggccaattacatgtacttcaaatcatttttacagaagcctatttccaatatcatgacaaaacactgacagggcacaaacacacataagcctaaagtaaggagtatttttccactttaatcctaaggggtatcacacagtgcaaaaaatatatcactgtcacatcaaagaagagaaaaatatgtattcttcatatatacagtatatttagtatacagaaataaatgttaaaaaaccagacaatgtactatattggtaaataatccacaacaagctcttgtaaggataatcaaaatcaatggaaattctgtattatcaaacaatcatagcactgagaagataagattacaaaaattagccaggtgtggtagcccaccctgtcgtcccagctactcaggaggcttaggcacaagaattgatttaagccaagatgcaaagtttgcagtgagcccacatcgcaccactgcactccagcctgggtgacaaagtgagactctgtctcagaaaacaaaaaaaggcagggggtggtggctcgcgcctgtgatcccagtactttggaaggcggaggcaggcacatcgcctcaggttaggagtttgaccaacctggccaacatggcgaagccctgtctctgctaaaaatagaaaatgtagccgggcatggtcatgggcagctgtaatcccagctagctgaaaggatgaggcaggaaaatcacttgaactcgggaggcaaagattgtggtgagctgagatcacaccattgcactccaccttgggtgacagagtgagactccgtctcaaaaaaaaaagaaaatgttaatagcatatttttctgaataactgttacaaaattacctatatccatgtggaacaggcatgttgtaacttaaaaaaaaaattttgtatttttatttttttgagatggagtctcactctgtcacccaggctggagtgcaatggcataatcttggttcactgcaacctccgcctcctgggttcaagcgagtctcttgcctcagcttcccgagcacctgggattacaggcgcacaccactatgcccagctaatttttatacttttaatagagatgggctttcaccatgttggccaggctagtctcgaactcctgtgaactcctgtgatctcgaactctggtgatccacacttctcggcctcccaaagtcctgggattacaggcatgagccactgtgcccagcggcagtttgtgacattaacgaagggagtgtgtcagttatattgaataccacataccaaaaactcataaaaggaagaaaataataagtcaatttatactgcctgcagaattctaaacaattccctcttaagaaaaaggccataacttgtagttaccacccgtacacaacataagaactgaaatacatgttaaaatcactaccttctgaagtatgaggtgaagaaaatacacagaattataaggaataagaattgactaatggccggccacggtggcacatacctgtaatcccagcattttggtaggctgagtcgggtggatcatgaggtcaggagtttgagaccagcctggaacaaatggtaaaaccccatctctattaaaaatacaaaaaaaattagctggacgtggtggcaggtgcatgtaatcccagctacttgggaatctgaggcaggaatcatttgaacccaggaggcggaggttgcagtgagccaagatagtgccactgcactctagcctgggcaacaagatgagattccatctcaaaaaaaataaaataagataaataactacttctcatataagctttggtagatgtggtattctctaataggatgttcctgcagatgcagactttgagagaatttagtcatgggtgttgactcctcatgaataggactagtgcatttatagagacattaaagagctcattgcctgttcctctttctaccatattgggacatggcaggaagatggctgggctaaaccgtgaagaagcctctcaccaggaatcaatttggctggcaccttgctcttggatttcccactttccaaattcatgagaaataaatttctgtgtcttaagcttcccagtttaagctacttcctttttcgtttattcttcagatcgagtcacgctcttatcacccaggctagagtgtactggcaggattctcctacctcaactgattctccctcctcagcccagagtctcactctgttgcccgggctggagtgcagtggcgtgatctcagctccctgcaacctccacctcatgggttcaagtgattctcctgcctcagcctcccaagtagctgggattataggcgcaagtcaccatgcacagctggtttttgtggttttagtagagatggggttttaccatattggccaggcttgtcttgaactcctgacctcaagtgatcaacctgtctcagcctcccaaagtgctgggattttaggtgtgagccactgcgcctggcccatttttggcatttagtacattccaggtttcaccatgttggccagactgttttcaaactcctgacctcaagcaatctacccaccttggtctttgaaagtgctaggattagaggcatgagccaccgtggccagtcagtctaagctatttctaacagtgaaatgacagagaaaggaacaggagcatctcatcatcaacatcaccacaggctgacaaatcttattaaacaaaggatgtttagggtctctactataaatcttgcaatacttgaagccatctaatagcactaacatgttttaaaaaccttgagacatgtagggcatggtaatcccagcattttgggaggatgaggtgggagattcctgaggtcaggagatcaagaccatcccagctaacaaggtaaaaccccatctctgctaaaaaaaaatacaaaaaaattagcctggcatgttggcactcgcctgtagtcccagctacttgagaggctgaggcaggagaatcactggaatttgggaagtggaggttgcagtgacccaagatcacaccactgcactttagcctgggtgagagactgagactgtgtctcaaagaaaaaataaataaatgacagaaggctaaagaataactccaacccacaaacatatataaagttctccagtaaaggtaaataaaaaaaacgggtaggctgggcatggtggttcatgcctataatcccagcactttgggagggcaagccaggcggatcacctggggtcaagggttcgagaccagcctggacaacaaggagtaaaccctgtctctaccaaaaatacaaaattaggccaggcgtggtggctcatgcctgtaatcccagcactttgggaggctgaggtgggtggatcacaaggtcaggagatcgagaccatcctggctaacacagtgaaaccccgtctgaactaaaaataccaaaaattagccaggcatagtggccagcacctgtagtcccagctactcaggaggctgaggcaggagaactgcttgaacctgggaggtggaggttgcagtgagctgagattgcaccattgcactccagcctgggaaacaggagtgaaactctgtctcaaaaaaataaataaataaataaaacaataaaaatacaaaattagctgggtgtggtggcgcatgcctgtaatcccagctactcgacaggctgaggcaggagaattggttgaaccggggaggtggaggttgtggtgtcaagattgcagcactgcacttcagcctgggtgacaagagcaaaactctgtctcataaatacataaattaattaattaataaaaggacagatacagaaactcgcatacgtataccttttcttcataactaaactttttttcatattattaaaaatgaaaatgtatgaaaaaacactgtacatatatgttaacagaaatgcaacatacacaaaaataactctgacaaaaataaaaaagttctactggagaagaagtagtttttgtaggttatggaatttttttatttttatttttatttttttgacatggagtctcactctgtctcccaggctggagtgcaatggtgcgatcttggctcactgcaacctccacctcccaggttcaagtgactctcctgcctgagcctcctgagtagctgggattacagctgcccaccactgtgcctggctaatttttgtaaatttagtacagatgaagtttcatcatgctacccaggctggttctgaactcctgacctcaggcgatctgcccacctcggcatcccagtgctggaataacaggtgtcagccactgcacctggccaggttatggaaattttaagcttcattattgtgctataagtttaagatgtttaacatacctgcaacaataacctctccccatatatcaatacaacgcacttcacttctgcgtactgaacggaatggacactaatgtggttgttatattcacactggaatcatgtttaaaccacttatgtttactaagaactaaaagacaaaactatttaaaagaataaccatggttgggcatggcagctcgcgcctgtaatcccagcattttgggaagccgaagcaggtgaatcacttgagataaggagtttgagaccagcctgaacaacatggtgaaaccccatctctactaaaaacacaaagtgagctgggcatggtggtgagcgcctgcagtcccagcctccaagaaaggtggggcacaagaatcctttgagcctgaaaggcagaggctgcagttagccaagatcgttccactgcactgtagcctggatgaaagagtgaaactatcaaaagaaaaagaaagaaaagaagaaagaaagaaagaaaagaaagaaagaaggaaggaaggaaggaaggaaggaaggaaaagaaaaaacaaaacaaaagaaaagaaaagaagtaaataaggaaagagcagagggataagtgagggcaaagaaagatgtcccttcagagatctcaggattgaaacttttcttttgccacagaattctcccacttgcagagagtttccccacacactatttgaaggtggagcttccactctgcccatctgagctcttacctgcgtttacacctgtaatacattcccacccatctggagttttttgttattttcacttaactctccacagtccagggctctttcccttgctccaacatggagataacaggtcagaaagagactcgtgcttataaaaagaaaggaccatgatgtgctggagcttttctagagtcccagccctatatttctgtaggaaagaagacattacaggtggatctaggaaaatatttcacaaattcctccactgactgcctcattctgaatgctgttggagcactgtaatatgtaatatgtggacatcgggctatcttccaagaactaatgagttgaaagcacaggagaagcaaacagggaactggatatgtttaaagtctaccataaggttttgtttttgttttttgagacagtcttgctctgtcgtctgggctggagtgcagcggtgtgttctcggctcactgcaaccttggcctcctgggttcaagcaattctctctcctcagcctttctaggagctgggattgcaggtgtgcaccatgacgtccggctaatttttgtatttttagtagagacagggtttcaccatgttggccaggctggtctcaaactcctgacctgaagtgatccacacacctcagtctcccaaggttctgggatgacaggcatgaaccaccatgcccagcttgccataaggttttatgcctactttagttctggaacccacattgaggtatcatgaagaacgcagaacatctaaacaaaggggacagtgaaagtccagatgctacatcatgaagcttttcatttcaaaatcaatacagcttccattttagtcaagcaaggatgcaactcccaagagaaacaagagaaaatacaaagatccacaagggcacatccccacttctggagggaagttatcctcacccagggagaccaggttcctataattctccagcatcacgtctctgtatagagtcctctgagcagggtccaggcatttccactcctcctgagagaattctatggccacatccctgaatgtcagtagaccctgaaaggaaaacacattttaagcaaatggttatgggaggagatcttatctttacagaaaatgagaagaggagaggggaaagcatggatttaattgcagagaatgttccgacaaatccaagtaagggattcttcaccacatgatgtcttcccagtggtgtttgattatactttctgaagagctcaggataccctctcagtatgaattgcttacgttagaaataaataattagccgggtatggtggcaggcatctgttgtcccaactacttggaaggctgaggtgggaggacggcttgaccttgatggtggaggtttcagtgagctgcgattgcaccaaggcattctagcctgggcaacaaagcaagactctctctcaaaataaaataaaatacatgaaagtaaaattacacaaagcacaaaaatccattttgtaaatgttcacaaaataataaaacctacacagactgaaaaaaaactagatgttaatacaaagggttgtcatttgtcccagattttcaaaatataaaagattttcaaaatatatacgtgtgtgtacatatgtatgtatgtataaatgtgtgtgtatgtgtgtggggatgtgtatgcatatacatatataggttttacaaatataaaaagtagcaagttttgcagggcgcagtggctcacgtctgtaatcccaacactttgggaggctgaggcgggtggatcatgaggtcagcagtttgagactagcctggccaacatggtgaaaccacatcttaactaaaaatacaaaaattagctgggcgtggtggcacgcacatggagtcccagctactggggaagctgaggcaggagaattacttgaacctgggcggcggagtttgcagtgagccgagaaatcgccattgcactccagcctggtgacagagtgacactccgtctcaaaaaaaaaagaaaaaaaaagtagcaagttttgtttaactgaagaggaatctcatcttgctggaaaaggatactttggcagctgctggtgggtggaatctcatcagatctagggaaacaggaaatgccccatcctagatgaatcaattacccttttaactgcctggcctggaggacagagaatggcttgaattcgggaggcagagggtgcagtaagccaagatcatgccactgtactccagcgtgggtgacagagcaagactccatttcagaaaaaataataataatagttataggtggaataagaatatggctttatcctctaggataaaaaagaagtaccgctgccatatttgagaaaaattgtaaccagttttaccacaaacacctgtttcacaagcctctccacaggaaccccacagtctccatgagcgtaatgtgctaagaatggtctaacgaatctcctgctattatttaggttgatttcctattcttaaaataatgataggatcattcttgtatcattcatatctatgtatgaagtttccattctaattagtaagattttttgagtcagaaacacagtaagtcactcaattacctaaaaatgtactataatgtcaggcagaaaagatttcctattattggtctctctttctagaatttaccatgcactttgtgcacattaatatgtgacttccattggcagctgctctaatcctggtccacggagagctgacagagcatccagatgtggcccctgaacaatccctgctacccaacagcactgacaccatgggaccctcaccccgtctccatccatgtctgggtgtgagtccttcccaggaccatgcccagtgcagcctcttcccaacttcatgtcacttggtcacaggagataaaatctaagtgagataagagggactgagggaaggcatgggtgattgtgagcaaacctgtcaggcaggatgcttcagactaagagaagattcccaactccaggcgccagcatttctgaaaggaaggagacagaacaatccaccgagaatatcatctcacctgagaaagagccatccccgactcctttgctttcctcttcctcttctgggtttcttcctcaggtaccaagagtctttagaagtcaatcctaaatgttagaaatatgttgtttatcactgagaatcaacacaccccctccccataacacaatgacacatacaaaggaggcctcaccctgggaaatatggtcccctctgctgcccactgccccagggatgataaactcctacaggaaaactcccactaccctactggaggagtccacacacacgctgcagcagtggggagctgggctgggatgagctccccttcagggcacagactcagacctaaccaaaccccacacagaggctgggtgtggtggctcatgcctgtcaccccagcactctaggaggccgaggtgggtagatcgcttgagctcaggagtttgtgactagcctaggcaacatggtgaaaccccatctctacaaaaatacaaaaagttaggaaggtatggtggtgcacttctgtgtgtctgtggtcccagctacttagggagctgagatgagaggatcacttgtgctcaagagttcgagaccagcctggccaacatggtgaaaccctgtccctactaaaaatacaaaaattgggccgggcgcggtggctcatgcctgtaatactagcactctggaaggccgaggtgggtggattacttgaggtcaggagttctagaccagcctggccaacatggtgaaaccctgtctcttactaaaaatacaaaaagtagctgggcttggtgggcatctgtaatcccagctactcgggaagctgaggttggaggatcacttgaacctgggaagtggaggttgcaatgggccgagatcgtgcaactacactccagcctgggtgacagagtaagacttaaaaataaaacaaaacaaaataaaataaaataaaacaaaactacaaatacaaaaattagccaggtatggtggcgggtggcacgcacctgtatctcagctacttggtaggctgaggcacaagaatcacttgaacccaggagacagaggttgcagtgagccaagatcaggagactgcactcacagcctgaaggacagagtgagactctgtttgaggaagagaaaaaaaaaagcgtttctgatgtgatagagataataaaacctgagtaacatgatagagattgatgggcagagggaatttcagatgggggtgggagggcatgggagacagctctgagcctagacctgaaggagcagaaagggagatggctgtgatcatttagggacatagggtaagaacggggaaaatgacctgagacaggaagggttttgatgtttggggaaagagataagcaaatgtgactggggcggagggagtcattagattagggcaagctcccaggaggaggctggacactggcaggggccctggacacagggctgtggagccacactgatgagttgggcttttgtcctggggaacacgggaagctggtggagggttccctgccagggactgatgtgacctgctttacatttagctgtgatatcctcagagtggggacatattcaccgagttaccctgagaaggtctgagatgagtgagaaggtgtgtctgaattcttacatgggggcccagaagggctaatggaaagggttggtcttatcacctctctttgaaaattagagaagcatctttcacatacctgggctaaagaaacttcttttgcaacgttctgatgctattgactttcaacatttaattcttcttacaagaaaattatagtaacatatataaaatgcagaagtgaaaacacacagctactgaccttgaaaacagggaggccaggcagggtggctgaggcctgtaatcacagcactttgggaggccaaggcaggcagatcacctgaggtcaggagttcgagaccagcctgagcaatatggagaaacccccgtctctactaaaaatacaaaaattatctaggcatggtggctcatggttgtaatcccagctactcaggaaggttgaggcaggagaatcacttgaacccggaggcggaggttgcggtgagctgagattgcaccattgcactccagcctgggcaacaagagtgaaactgtgtctcaaaaaaacaaacaaacgaacaaacaaaaaaagaaaatagggaaagagggtcagctgtagaactactatataagcaaatgttttcaatcaagaaaacatgggtggccagatacagtggctcatgcctgtaatcccagcactttgggaggtcaaggcaggtggatcacctgaggtcaggagttcgagaccaacctggcaaacacagtgaaaccctgtctctactaaaaatacaaaaattagccaggctccatctccacaactcatttaatctcttgctgctccttctccccaatctttagatcatcctcaatctctatagatttccacctcttctcccatctctgtgcatcctctgctctccctgttaaattgtctcttccttgttatacctccctggccccactctctggcaccccagatccccaggtgtcctccctgctgtgcttctccctctgttctccttgccaccagcaccactctgctctgtctgccctggctccaaatccctcctcctctccctcactctgatgagactccctctttgctgtccctctccctaccttgctgtccttcatctctctgtacatctagcttttctctacatttctccagttgcttttctcctcctgctttcttattttttttttcacttttgctgtctcttggcaaatccctcacccatcttctactttgccatctgttatgggcctttctcattcttcttttctctgtctcaggttttttactgctctctctctgtctcctgatccctttggcccacacaatcacaggagggtttggacaccttcatgtcagaggagcccattttccaggggctggcactgggcagggaagaacaccttgtgtcaccatataggccccaggcacctccccaatgcgggcctgggcaacagagcaagactttctcaaaataataataataacaataataattatgtatatatattgcaaatgctgtgttttctacgtaaaccatgggcttggccacacgcattacctcatgcctgtaatcccagcactttgggagggtgaggcggtggatcatgagatcaagaggttgagacaattttggccagcgtggtgaaacccgctctctactacaagtacaaaattagctgggcttctcggcacgcccctgttgtcccagctacttgggagactgaggcaaaagaatcacttgaactcgggagtcagaagttgcagtgagctgagatggcaccagtgcactccagcctgtcgacaaagtgagactctgtctcaaaaaaaaatcatgggcttatccattaatgcacttctgcacatacttcaaattacatccacacacacttaaattaacttgcgttcagaaggtataagcaaaaacctggagaggacacaaccaaagctactcaccaggctgaggtgggagaattgcttgagcccggagagcagaggttgaagtgaatcaagatcgcacaactgccctccagcctgggggacacagcgaaactccatcacctccaccccccaaaaagttggaagctcactgaattaagatacaacttcaagaaatcataaaagcaatgcatgaagaacatgagaaggacaaccaacatacagaaattatgacgaactacacagaaactctcgggataaaaatacagtaactaaatggaaaaactcaatacatgggttcaaaatcagaattcattatgtaaattaaaaactagtgaagaggggtcaggcaaggtggctcacacctgtaatcccaggactctgggaggccgaggtgggtggatcacttgaggtcgagttcagagaacagtctggccaatatggtgaaaccttgtctctactaaaaatacaaagattagctgggtgtggtggctggctcctgtagtcccaggtactctggaggctgagtcaagagaagcacttgaacatggaaggcagaggttgcagtgagccggattgccccactgtactccagcctgggtgacagagcaagactgtctcaaaaaaaaaaaaaaaaccaaaaaacaaagaaagaaaattccaggactatcttttatacacctgagcaaaaggaatgtctctctccatgtctaaggttctgatggcatgaatcctaaacatgtaattattttcccagaaatatgacagtaatacgttcaaaataaacacaagtgtgaacacatagctataggtgtttaaaacactgaaagaggccaggcgcggtggctcacgcctgtaatcctagcactttgggaggccgaggcaggtggatcacgagctcaggagattgagaccatcctggtccacatggtaaaacccggtttctactaaaaatacaaaaattagcctggcatggtggtgtgtgcctgtaatcccagctactcgggaggctgagacaggaaaatcattggaacccgggaggcagaggttgcagtgagccaagatcacaccactgcactccagcctgggtgacagagtgagactccttctcaaacaaaacaaaacaaaacaaaaaccaaaacaacaacaacaacaaaaaacactgaaagagaggcaatggtagtcataagctgtaagcaaatgttttcttcatgaacacatgggctctgctggaacaaggttccaaaacaatccagcccatcgttcaacatctgcaaggaatattatgaaccagaggaacttgagggagacatttacttagaagctcacagctcaccattttatcagatgacataaggaaagaaaatagaataggctacttgaaccaaattttgatgttagcgtaaagaagaaaggtcctggggccgggcgtggtggctcacaccttaaatcccagcactttgggaggccgaggtgggtggatcacctgaggttgggagtttgagaccagcctgacaaacatggagaaaccccatctccactagaaatacaaaattagcttggcgcagtggcacatgcctgtaatcccggctactggggaggctgaggcaggagatcacttgaacccaggaggcggaggttgtggtgagccaagatcgcgccattgcactccagcctgggcaataagagcaaaactccatctcaaaacaaacaaacaaaataggtccttgatatctttataaagtacacattgaaacaacctaaaattggccaggcacggtggctcacacctgtaatcccagcactttctgaggctgaggtgggcggatcacctgaggtcaggagttcaagaccagcctggccaacatggtgaaaccccgtctccattagaaatacaaaaattagccaggcgtggtggcaggcgcctgtaatcccagctacttgggggctgaggcaggagaagagcttgaacccaaaagacggaggttgcagtgagccgagatcgtgccatcacactccagcctgggggtagaagggagactttgtctcaaaaaaaagtaagaaagaaaaaaagaaacaacctaaaatcatttatcaggtactagtaaatgcttccaatatatgatacagactagaaagcatgcagtcttctatgtaaactgaacacaacaaatttcatagagaaacttttaaaatggttaaaaatatatacatctaaaaatgtatatatctaataaaatgtagggtcaaagaagaaaattttgaactcatatcatagttggaaaacaatgatgtgagctcataagattctaccaaagcttatttgaaaagtagttatcttacttttttcagacggagtctcgctctgtcaccccaggctggagtgcagtggcatgatctcagctcactgcaacctccccctccctgtccaagggattctgctgcctcagcctcctgagtagctgggattacaggcgcccgacatcacacctggctaatttctgtattttattcgacacgagatttcgccatgttgactaggctggtctcgaactcctgacctcaggtgatctgcccgccttggcctcccaaagtgctgggattacaggcatgagccattgcacacggcctttatttttatttatttattttttaattaagaaacaaggcgggcatggtggctcatgcctgtaattccagcattttgggagggcgatacagctggatcgcttgagccctggagttggagaccagcctgagcaacaaggcaaaagcccgtctctaccaagtacacaaaaattagcgcggtgtggtggcgcgcggctgtggtcccagctactctgcaggctgaggtgacaggatcgcttgagcataggatgttgatgatgcagtgagctgtgatcctgtcaccgctctcccgcctgggcaacagagtgagaccccatctccaataaaaaagaataaaaaagaaatacctgggtcctgggtctgggggcagcgaatctaaggccaattaaggcaaactttctaaaactagacaaaaaggaaaaaccccatctccccatccggagtaacaaaggatcaaaggccgctgtccctaccgccctcctccttccaccacgtctcagaaagggaaagagcccaggagtggccatggccaagcaccggccacaccttcatctgcatagggcacccatctgctccggcctcgggccaattcacctcagcatttcgttggccaagggccaaaaatccttcatccagataaggggtagcccatagggacctcaaaataaatactttaaccccctaaaactttctaaacgggtccccggagacgctggctcgggcccactcccctctgtggagtgctttcttgattgcatatattcgttttccaggagttggaactaggtagcaacaccgcacaaggagggaggtggggagcgacggagccttcggacaggggtggcgtctgcaggatcttaggaccaggcagaggacgcggcctcccgggaaccggggttgaggcgcggcgctcctgaagccgccgagagcgacggtgggaggcgcctagggctggaatccagctcgcgggtgaggacttgaaacagcgcgaggcgggaggacaggtcaggaagggttttgagaaggaaaattccgcgataggaggtgtctgcacgaccccactgcagaaagaccgaggacgggacctgcctcagggccactttaaactcgaagggactcacggactctcacccggacgtctcaatttgctctgggttgagaaagaggggccgcaatttccaggtctgtggggactcaacgtccccggtatagcagcaccacaggactgggaagcacacataaaacagagcgaaactcacgcgctgtggtgtgaccttcagtccctgccatccgcttccgggtctatgccaatcagcgcaggacagaggccaggcctgggcgggacccccgagaaggtaggcggggcctggactaggccgggatgagacgcgaagaggtgggcggggcctgaacaaggccggggcggggttgagaaacaaggggcctggctgggagaagagtcctgggctatgaggggtcggcgggggcgagaagcgggtgggtcctgagctttcctccatctcgctctctgcgccttttttccaggttttggaggcgaaagccgccagtgaggctggagcagctcagcagtcattgaaatagtacctccctgagaagtcaacgtgaggcggtcattggacccaggaaagttccttgctattgaaattaattttagcaatttatgtccaaaatctggaagttgtcaagggaaggaatgcaaactagaatgcgaaatacaaagctctgcctcagcgaaacctccaatttcctgctgacggcccacagaacagaatagcaaatcctctccctttctattttccattcactggggtgggagaatccaccctgtgctcagctccagagacttcctcagggccaccgcctggggtgcggagcggaggcctcaggccagggaggagtgaggtcaccacctcctgcttaaacacagcagggatgtgggcgaggtggcgagtctggggtcccggctactcaggaagcaggagccgcaagaccgctgagcccggaggtccaggccagcgtgggcgacaaagtaagaccctctaccccagagctccttcctccgcctcaataagaaaaaaagggatttttaaaaaaagcattgacattgtaacagtgtgtagcagggctagcggcagacaaaacttctcagacactgagttgtagaaggaagggctttattcagctgggagcgtcagcaatctactgccttgaaatccgagctccctgaatgcacaatttctgtcctttttaagggttcacaacactaaagatttcacatgaaagggtcgtgattgatttgagcgagcaggcggtacgtgacaggggatgcatgcaccggtggtcagagagaaacagaacagagcggggagttttacaatgttcttctatacaatgtctggaatctatgaataacattgggttctaagccataagttgatttttaactactgggtttaggccaggcaggcccaggcctggtttcgggcctggccccggggctgcctgtctttggttttactttcttgttgttttttcttaaaacaggtactgagtataaaacaatatgagagggtctctgtcttcctttatttcttctttttgagagtctcactttttattagtgggagttcttactcttgtttttgctacttatgtctttttgtgtaatagattgatagtgattcatatagtacacttgtgctgaatcattttggtgaactaaggtagcgatgaagctttttatcatttgaagaggtacaggtagcaaacaagagagcagtaagcagctttttattactattataactcttattataagagttttaaatcctcctattgctgggaactaatttttaaacatggctcctggattgagtccgtgccacacctgtacgggtacatgtgtcagttttgttatatttttaactatgtcttcaactactttcctctgatgatctatgtgtagacaacaattagtaaggttaaattttctacaaacttttccttcagctgctagcaagtagtcgagagctagtctattttgatagatagcatttctttttctttttttggtgatggagtctcgctctgtcacccaggctggagtgcagtggtgcagtctcagctcactgcaagctccacctcccgggttcacgccattctcctgcctcagcctccctagtagctgggactacaggtgctgccaccgcacccggctaattttttgtatttttagtagagacggggtttcactgtgttagccaggatggtcttgatctcctgactttgtgatctgcccgcctcagtctcccaaagtgctgggattacaggcgtgagccaccgcgcccggtgatagatagcatttcttatcagagtctcttgccgggcaagaacagtcaaggcttgaccggttttattagtaataatttttaaaacagcttgcaactgtatgattcggttgagcatgtagatgggggttcgataacctcatgagctgtcttgtgtctaagtggcaggcttacagtattatataattctttaggaggtcatttatcatctttctaattacctatggctatgcttcgtttttcacaggaagcatagactgggaagcctagaagttcacctgtatttatgggcagtaagaggaaagatggcttactggtgccaattacacagctacctgtccactgatcaggcagcttagcatgagctctgtctatgtatctggtataacctggtgggggccgtctagtcctggtggaattccgggtgggcctcaacagtctgcaactttggaaatttactgaatggatttctttttgtgtaactggaactttagtatgtaactgtttttgtggtactattatacaacttttgcctaagacaactaagccgccttacaggatgatgagtgaatttttttctttctctagctatgcaataccgtctaataattgagacttttagaacttaaaaattgtcagggtggttcttttgggctgggaattcatcaggaactgggtttgtaggaactaattctcgggcttcctatggccattgatctcttgttacagttcttctacaaacataacatgaggtgacttgtagagactgggcctcatgttaggctaattgcaaaaacaaatttttagtttttcctggaatcttaggtactggcacatttatttcatcatagaaagcctgaaatactggttctggagagcatttttcaacttctttttttattaggatgtttacgctaggatctagttttttttcatcaatgcttaatttacattttttttttaattgtactttgggtctgatgggtttgtgattatcaattttaaaaggctgcagcccccactcatgcaagaggggctgacttttcttttttggagctaaacaggattatttttatcttctttttaagtagcccaaatgacataagactagtattgacacatctcacataaatatgattcttgacagatatacttatttttttttttaactgtgtaactttttttctaatttagagaactgcatcttattctatgctgcttactatcaatagtggcacaagcatcaaattttaaggttatatttttggggacccctcttctgttctagctattattttacttgtgtcacttagaaaaagactagtctttaattttattttaaaaactgtaatcatgggaggcttaaaatgggttataacacacatcaggttggttattccttgggctacatactttggatagaatagcattatacaaacaaatttcttttagaatcctggtacacttataataactataaaataataggactgtagcaatcttttgtctaacttcagtgacttgatgtagatactggaaacagttctttgtctgaggaaggtcagttgaagtccttactgtacaagtctaaattttaaggaaaatgagtcctgcgatgagtttcttcctgcttcagtcgtgcgtggaccagtcagcttccgggtgtgactgcagcagggcttgtcatcttcttcagagtcactttgcaggggttggcgaagctgctcttatctacgtacagctcctagtctactgatgtttaagggtggtctcagaggttgggcccactagaataaactgagtccagcacctctaaacagttatgtttaactgggctctttgatactaggagtaaggtggcggggttagggtgttgcaaacttcaatggttatgtggggattttcacagagcaagctttggtatctagttagtctagcgtttattagctaatgatgtcttttgttatttattaaagggactttatgtttatgttttgcctaagagttagcttatctgcttcttgtgctaacagggccattgctgccagggcccttggacatgggggccagccttgggaaacctcgtctagttgttttgagagtcaggctactggccttggccagggccttacagtctgggttaaaacttcaactgccatttttttttttctttctgacacatagagtgcaaagagttttgtcaggtcaggtagcctcagggctggggctgacatgagtttttcttttttttttttctggttgatgaaataccagggtgaaatggactaaaccataagtgccactctagttattcggcagagtgcctactaaaggtctactacaataccaccacacatctgctcagagatgaacaagggctgaccgattgataagctcttgaaaattcttaagctcactgcatcctttcaggtctccaaggaatgctaaatctcctctctgccgtgagatacaagaagtgaacttagtattgggagacggaagctggaaggccctcgggggctgatccgcagggacttcgggatatagcagagagagctatatgttactccaggctgtagaatcctggaaaagagctaccatgcagcccacacctggtcaactacaggaccaccttagtggaagggggacaatcagggcctctggcctgccatgtgcacaagcataacaattgcttttgtttaatgtgcagatggaatatttgatctatttcaaccaggcatttgcatcttggtatgctgtctcaattgccaaagtttgttttaagtctttaacttctatcatcctctagtaaaatgaatgcttcctttagcaccgatttttattagtttttagaccaaagaaagctgaacaccattttatatttaataatgcttcttgtatgatttttataccagataagctaaattttacttttatattagtgtgttactaatgttaaatttaattttaatgaaactttgtagacatatttatctaatttttcatgtttgaccataaggttagattttgtagactctttttaactttttgtaatttttgttaaagagcaggttgatgctttaagaaaaaacctgttgcatttttactttgatgtccgtttcacagaaaaactggatgatacctttttaactttagctaatatgtttacacacagaattttctttacaattaatgttttaaaacttgcttaaactttcaaacaataatttttttaactttttaatataggtaaaaatccacattcttatgcctccttataatctttttactataggtatattttacttttcttatacaccttgtacataaactgtttcttcaataataggaggccttattacttttaaattatacattttttgcataaaaaaattttttaaagcaaactttatgtctttggactagactgtctaaggctaccagattagaagttactataatacatgctacgctgttaacttttagcaaacttcacttttgttgaaaaccttgtaagtttgggacttcaattatcctttgctattaataagaccttgtttagtctaaattaacttagaattggtatagatggcctctttttctctctgctggtcttttcttgcctctgccagccacttatgctgctgttcttttaactactgtggggggcggggggaggaggtctaaaaccaggtgtaactgtctgtgtactgaaactggtctgggtgccttggcttacaggttaccttgtgccatatctttgaaactagggacccatccaggcttccttctgatggctaacctacctcaaatgctggccagtctatttcacacaaagttctaagttttcctggggtcacagttacaccataatctcctttaaattctttcttgaaattctttaacatatttcttagtggggtgggcttactttgtgcctgaactatgttttttttttcttctgagacaaaatgccatgctcacaccacacatactcaccacaagaatgggtaaagagggcacacacacgcacttttaccgtttataccaaaccaaaatcatgaaattcaaaatctgagtactaaaaaattcaagccaagtcaaaaccaaaactaaagtatctaacaattcaaatcaagtcaaaaccagaacaaaagtgccaatgcaggcatgctgtgggtgatcaggccacgcttccactcagatggagtggggcaagttccaaagactagtcttactaagtaaagccaagtcaaaaccaggacaaaagtgccaatacaggcatgctgtgggtgatcaggccacgcttccactcaggtggagtggggcaagttccaaagattagtcttaccaagtttcagatgtctggactccaagtgccagttccttcctggtgttcagccactgcgttaatcctccgtgggggcctgctatgcaccgctctggcgaggcattccattggggcaatttcctacccaggagcgctctttggatcgtgtcactcaggctggccagagtcccccgcggggatgctccacagggcaggcctaagccacctaaagggctgcctcggccatccatcagttacctcattttcaggtcagggaaccaagaaaagtagcaggatgagcctcagacaaaacctctcagacactgagttgcagaaggaagggctttattcagctgggagcatcggcaagctactgccttaaaatctgagctcccctaatgcacaatttctgtcctttttaagggctcacaacactaaggatttcacatgaaacggtcgtgattgatttgagcaagcagtgggtatgtgacaggggctgcatgcaccggtgttcagagtggaaaagaacagagcagggagtttcacaatgttcttctatacaatgtctggaatctatgaataacatcagtttctaagttatgagttgatttttaactactgggtttaggccaggcaggcccaggcctggtttcaggcctggcgccgggctgcctgtctttgatttcacttccttgtttttttcctaaaacaggtactgagtataaaacaatataaaacaatatgagagggtctctctcttccctcaaaactactaaataaattcagtggatttgcacaatacaatatcggcaccaaaaattacttgaatttccacacattaacaataaacaattttaaaagaaaatttaaaaacacttccatttgctagagaacttaaagtaagaaatacttaggaataaacgtacaaagctgagaagtttgtaccttgaaatctataaatgttgatcaaaatgattaaaaacatacatagagatacaacccatattgatagtttggaaaaattaatattgttaagtaattatataacccaatgtgatttagattcaacacggtacccataaaaatgcctatcagttgacattccaccacaaaagaagtgaaattggctggtccctgccttaactgatgacattaccttgtgaaattccttctcctggctcatcctggctcaaaaactcccccactgagcaccttgtgacccccacctctgccagccagagaacaaccccctttgattgtaactttccactacctacccaaatcctataaaacggccccaccccatctcccttccctgactctcttttcggactcagcttgcctgcacccaggtgattaaaaaaaaaaaaaatctgtatctgtttttgttaaagaaacaaaaaacaggctgggaaaagtggctcacgcctgttggccacactagtctcaaactcctgacctcaagagatccacccaccttggcctcccacagtgctagcattacaggtgtgagccaccgcactcagcctaatcctcttaacataaacactttaatgtcaattaatgcttgaactcaacgttaagtcaactcaaactcaagtcaatgctgaactgactctagtgtcaattaatgcttgatggtttgctatactcattgcattcggaactattatctcaaaaataaattttctgatattctgcaaggagtgatctcagactgaagaccttgccacactgatgacatttgtaagatttctgtccagtatggattctttgatgtctaatgaggtgtgaacgtgaagtaaaggctttgctcacaatcatcacacttgtgaggtttctctcctgtatgaattctcctgttttgcataggatgaagcttgactgaagaccttgcctcaatcatgacatttgtaaggtttctctccagtatgagttcacccatgaactacagcgtatgaacgatgtctgaaaaatttgccacatttactacacttgtaagatctctattcattatggattcttcaatgatttgcaatggttgtagcgttactgaagacttggtgacaatcattacattagtcaagtttccctacaccatggattgcctgatggtgaataagtgttgactgtgcacgaaaggctttgccacactcactacacttgaaaggtttctctccagtatgaattctagtatgttgtgccaggtgtgagtaacacttgaaagccttgtcacaaaccttacatttgtatggtttctctccagtgtgaactctctgatgttgtgcaaggtatgaatcacgcccaaaagccttgtcgcaaaccctacatttgtatggtttctctccagtatgaactctcctatgtatttcaaggtgtgatttgatattgaaaactttgtcacattcttcacatttgtaaggtttctctccagtatgaagtctatgatgacatgcaagttgtgactgtgtcctaaaaaccttgccacattcattacacttgtaaggtttctctccagtatgaagtctatgatgatatgcaaggcttgatttgtgattaaaacttttgccacattcattacacttgtaacgtttctctccagtatgaatgaccttatgcattacaagagatgaattttgaacgaaggtcttgccacactcattacacttgtaaggtttctctccagtgtgaattacagtatgttgtgccaggtgtgaatcacgtctgaaagccttgtcacaaaccttacatttgtatggtttctcaccagtgtgaattctcctatgtctttcaaggtgtgatttgcgactgaaaactttgtcacattctttacatttgtaaggtttctctccagtatgaagtctatgatgacgtgcaaggtttgattgttgattgaaaaccttgccacattcattacacttgtaaggtttctctccagtatgaattgtcttgtgaactaagagggctgaattttcaccaaacgttttgccacactcattacacttgtaaggtttctctctagtgtgaattacaatatgctgtgccaggtgtgaatcatgtctgaaagccttgtcacaaaccttacatttgtatggtttctcaccagtgtgaattctcctatgtctttcaaggtatgatttgcgactgaaaactttgtcacattctttacattggtaaggtttctctccagtatgaactctatgatgacgtgcaaggtttgattgttgattaaaaaccttgccacattcattacacttgtaaggtttctctccagtatgaattgtcttgtgaactaagagggctgacttgtcactgaacgtcttgccacactcattacacttgtaaggtttttctccagtatgacgtctataatgacgtgcaaggtatgcttttttattaaaaaccttgccacatttattacacatgtaaggtttctcaccagtgtgacatctacgatggtgtgcaaggtatcgcttctgattaaagtctttgccacatacatcacatttatattgtttctctcctagatgaattatctgatgttttttaaagagtgagctacaattaaaggatttgccactctcattaaattggaaagatttttctttcctgtgtacatcctgtttctgtgtgagtaatgaagaatggaagaaattattcccatagttattagaaatatgggttttgggcctacaagaaattctttgggatgttgaaactgaggaagcattgttgatagacttctcaagttgattaccaattttcccttcgggctgaaatatgtgcagttcaggcagatgtgaatgaaagcttgatccaagctgatatttaataggcttgtttccagcatgcctttgatcatattggtctgtactacccgtcaactctttgatttctgtcatgggtgcttcatggccatttgtttcatcttcttgccactgaaacacaaagtcatgaatgtctttctcaatttcctggaagcaacattctccaatgtgatgacttgccagtctttgcaatgtccctgtgtggatcacttctgtattgcctttccctattgatgagaactccatcatgcatttggaagagatatctacaaaatataaacgccaatagttttccaattcagtacagataatatataatactgaaacgtgtaaatatgacaccaaaaacaatacttattttaaacatctcaaacatgagcttcaaagttcaggaacacaaaaggaggaagatcctttaataaatgaagggcgattacatgtacttcagatcatttctatggaagcctatttctaatatcatgacaaaacactgacagggcacaaacatgtgtaagcctaaagtaaggagtatttttccattgtgaccttaaagtgtgtcacagtttgcaaaaaatttatcactgtaacaacaaaaagaagaaaatatatattcttcatatttacagcatatttactgtatagaaataaatgctaaaggaccggacaatgtactatattggtaaataatcaacaacaagctcttgtaaggataaccaaaatcaatggaaatcctgtactgtcaaaccatcacagcacagagaagataataaaagattacaaaaattagccaggtgttgtggcccgtgcctgtaatcccaggtactcgggaggctgaggcacaagaatcactttaagccaagaggcaaaggttgcagtgagccaacatcgcaccactgcaccacagcctgggtgacaaagtgagactcgagtcaaaaaaaaaaaaaaaaaaaaggcagggcttggtggcccacaccagtaatcccactactttgggaggccgaggcaggtggatctcctcagatcaggagtatgaccagcctggccatcgtggcaaaaccccgtctctactaaaaatacaaaaagtagccgggcgtggtcgcgggagcctgtaatcccagctacttgggaggctgaggcaggagaattgcttgaacccgggaggcgaagatagtggtaaactgagatcgcaccactgcactccagcctgagcaaaaaagtgagactccatctcaaaaaaaaaagaaaatgttaataccatatttttctgaataactgttacaaaattacctatatccatgtggaacaggcgctttgtaactttttaaaaaaaatttttgtatttttttttttttgagatggagtctcgctctgtcacccaggctggagtgcagtggcacaatctgggctcactgtaacctcaacctcctgggttcaagcgagtgtcttgcctcagcctcttgagtacctgggattacaggcacacaccaccatgcccagctaatttttaaatttttagtagagatggggtttcaccacgttggcaaggctcgtctcgaactcctgacctcaggtgacccacatgtctcagcctcctaaatcctgggattacaggcatgagccactgcgcccgggggcacttttgacattaatgagtggaatctctcagttatattgcataccacgtaccaaaaactcacatgtaaaatcataaaatcaattaataaaatatattattaattcattaatcaaataataaaatactgtaacccatgataaaacaagcaagaaaataagtagatttatactgcctgcagaattctaaacaattccctcttaagaaaaaaaccacaacttgttcttaccaccagtacacaacataagaacagaaatacatgttaagatcactaccttctaatatatgaggtcaagaaaatacacagcattataaggaataagaattgactatggccaggcatggtggctcatgcctgtaatcccaggactttgggaggccaaggcgggtggatcacccaaggtcaggagttctagaacagcctggccaacatggtgaaaccccgtctcaactaaaaatacaaaaattagccgggcgtgtaatccccactacttgggggacccgaggcaggagaatcactcgaccctggaaagcggaggttgcagtgagcatagactgcaccatcgcactccaaccttggggactagagcgagacttcgtctcaaaaaaaaaaaaaaaaaaaaaaaaaaaagaactgaataacaccagggcgcggtggtgcatgcctgtaatcccagcacttttggaggctgaggcaggtggatcatgaggtcataagttcaagaccagcctggacaacatggtgaaaccccatctctactaaaaatacaaaaaaaattagctatgcatggtggcgggtgcctttaatcccagctacttgggaggctgaagcaggaatcatttgaacctgggaggcggaggatgcagtgagccgagaccatgctactgcactccagcctgggtgagagaatgcgactacatctcaaaaaaataagataaataactacttctcaaataagctttggtagatgtggtattctctaataggatgttgctgcagatgcagacttggagagaatttagccatgggtgttgactacctgtgaatactaaaagtgcatttataaagagacattaaagagctcattgcctgttcctctttccaccatgttaggacatggcaggaagatggctgggctaaaccatgaagaagcctctcaccaggaacttatttggctggcaccttgctcttggatttctcccttcccaaattcatgaaaaataaatttctgtctcttaagcctcccagtgtaagctatttcctcttttgtctttgagattgagtcatgctctatcacccaggctcaagtgtagtggcatgattctcctacctcaagtgattctccctcctcagcccagagtctcactctgtcacccgggctggagtgcagtggggtgatcttagctcactgcaacctccacctcctgggttcaagtgattctcctgcttcaacctcccaagtctgggattacaggtgcacagcaccatgaacagctaatttttgtacttttagtagacacgggatttcaccatgttggccaggcttgtctcgaactcctgacctcaagtgattggcccgtctcagcctcccaaagtgctggaattacaggtgtgagcaattgcacctggcccatttttggcatttagtatatttgaggtttcaccatgttgtacagactggtctcaaactcctgacctcaagcaatctgcccaccttggtctccgaaagtgctgggattagaggagtgagccaccacagccagcagtctaagctatttctttttgttttcttttcttttttttttttttgagacggagtcttgctctgtcgcccaggctggagtgcagtggcatgatctcagctcactgcaacctccatctcccgggttcacgccattctcctgcctcagcctcctgagtagctgggaccacaggcgcccgccactatgcccagctaattttttgtatttttagtagagacggggtttcaccatgtcagccaggatggtctcgatctcctgacctcgtgatcctcccaccttggcctcccaaagtgctgggattacaggcgtgagccaccgtgcccagcatcagtctaagctatttctaacaggacagtgaaatgacagaaacaggaaaaagagcatcttatcatcaacatcaccgaaggctgacaaatcttattaaacaaaggaagttaagagcctgtgctgtaagacttgcaataaatgaagtcatctaatagcagtaacatattttattttattttatttatttttatttttttaagatggagtctcactctgtcgcccaggctggagtacagtggtgcaatctcagctcactgcaagctctgcctcttgggttcaggccattctcctgcctcagcctcccaggttgctgggactacaggcacccgccaccacaccctaattttttgtatttttagtagagaaggggtttcaccgtgttagtcaggatggtcgcgatctcctgacctcgtgatccacccgcctcggcctcccaaagtgctgggctcacaggagtgagccactgtgcccggcctttatttttatttttttttgagacggaatcttgctctgtcacccaggctggagtgtcgtggcaagatctcggctcactgcaagctccgcctcccgggttagcgccattctcctgcctcagcctcccgagtagctgggactacaggcacctgccaccgcgcccggctaattttttgtatttttagtagagatggggtttcaccatgttagccaggatggcctctatctcctgacctcgtgatccgcccccctcggcctcccaaagtgctgggattacaggcatgagccaccgtgcctggccagcaataacatattttaaatacattgagacaggccgggcacggtgtctcatgccagtaatcccagtattttgggaggctgaggtgggaggatcacgtggtcaggagattgagacagtcctggctaacaagctgaaaccccatctctactaaaaaaaaaaaaaaaaaaattagcccagcatgttggcagtcacctgcagtcccagctacttgagaggctgagacaggagaatcgcttgaacctgggaggtggaggttgcagtgggccgagatcacaccactgcactttagcctgggtgacagactgagactctgtctcaaagaaaataaaaataaatgaaagaaggctaaagagtaactccaacccagaagcatatacaaagttctccagtaaaggtaaattaaaaaacagataggccggacatggtgactcatgcctgtaatcccagcactttgggaggatgagccaggcagatcaactgaggtcgggagtttgagaccaccctaacctacaaggagaaaccctgtctctactaaaaatacaaaattagccgggtgtggcgatgcatgcctgtaatcccagctactccggaggctgaggcaggagaattgcttgaacccgggagatggaggttgtagtgagccaagatcgcaacattacatttcagcctaagtgatgagagcaaaattatgtctcataaacacataaattaattaataaaaggacagatacagaaactggcatatgtgtaccttttcttcataactaaacttttttcatattatttaaaagtcatgaaaaaacactgtaaatatatgttaatgaaaatgcaacatatacagaaataattctggcataaatttaaaaagttctactggagaagaagtagtttttgcaggttatggattcttttttttttttttttttttttgagatggagtctcactctgtcacccagcctggagtgcaatggtgcgatcctggctcactgcaacatccacctcccaggttcaagtgactctcctggatcagcctcctgagtagctgggattacagctgcccaccacagtgcctggctaagttttgtaattatactacagatgaagtttcagcatgttagctagccgggttctgaactgacctcaggtgatccgcccccggctcagcctcccaaagtcctgggattataggcgtgagccactgtacccggccaggttacagaaattttaagtttcattattatactataagtttaagatgtttaacatacctgcaacaataacctctgcccatatatctatacgacacacttcacttctgcgtactgaaaggaatggacactaacgtggttgttatattcacactggaatcatgcttaaaccacttatatgtttactaagaactaaaagacaaaactatttaaaataataacggttgggcatggtggctcacgcctgtaatcccagccctttgggaagctgaggcaggtgaatcacttgagataaggagtttgagaccagcctggccaacatggtgaaaccccatctctactaaaaacacaaagttagttgggcatggtggtgagagcctgcagtcccagctacccagaaagctggggcacaagaatcctttgagcccaaaaggcggaggctgcaattagccaaaattgcaccactgcactgtagccttggcgacagagtgagactctgtcataagaaaagaaagagcagagagataagtgagggcaaagaaagatgtcctttcaaagatctcaggattgaaactttcctttacccacagaattctcccacttgcagagagtttccccacacactatttgaaggtggagcttccactctgcccatctgagctcttacctgcgtttacacctgtaatatattcccacccatctggacttttttgctattttcacttcactctccacagtccagggctctttcccttgctccaacatggagataacaggtcagagactcctacttataaaaagaaaggaccatgaagtgctggagcttttctagagtcccagccctatgtttcagtaggaaagaagacattgcagatagatctaggaaaatatttctcaaattcctccactgactgcctcattctgaatgcttggggagcactgtaatatgtagtatgtggacatcgagctctcttccaagaactacagaatcgaaagcacaggagaagcaaacagggaactggatatctttaaactctgcagtaaggttttgtttttgttttttgagacagagtcttgctctgccatctgggctggagtgcagtggtgtgttctcggctcactagaaccttcacctcccgggtttgagtgattctctttcctcagcctttctaggagctaggattacaggtgtgtgccaccatccctggctaatttttgtatttttagtagagactgagtttctccatgttggccaggctggtctccaactcctgatctaaagtgatccacatacctcccaaggtgctgggatgacaggcgtgagccaccatgcccagcctgccataaagttttatgcctactttagtcctggaacccacattgaggtatcatgaagaatgcagaacatctaaacaaaggggacagtgaaagtccagatgctacatcatgaagcttttcatttcaaaatcaatacagcttccattttagtcaagcaaggatgcaactcccaagagaaacaagagaaaatgcaaagatccacaagggaacatccccaggaaggaagttatcctcacccagggagaccaggttcctataattctccagcatcacgtctctgtatagagtcctctgagcagggtccaggcatttccactcctcctgagagaattctatggccacatccctgaatgtcaatagaccctgaaatgaaaacacattttaaccaaatggttatgagaggagatcttatctttacagaaaatgagaagaagagaggggaaagcatggatttaattgtagtgaatgttctgacaaatccgagtaagggattcttcaccacatgatgtattttttttcttctttttctgtttgagatggagtgtcgccctgtcgcccaggctggagtgcagtggcatgatctcggctcactgcaagctctacctcacaggttcatgccattctcctccctcagcctcccaagtagatagtactacaggcatctgccaccatgcctggctaatttttttgtatttttagtagagatggggtttcaccatgttggccaggatggtctcgatctcctgacctcgtgatctgcccacctcggcctcccaaagttctgggattacaggcatgagccaccatacccggcctcacatgacgtctttattatactttttgaagaggtcaagacaccctgtcagtatgaatttcttatgtttgtaaaaaatataagaaataaataaaaaatcagtgcagggttcctgctatagaaatgtttgaaacttttatggacacaccaagtgacattcagtatctcgaagagacagagcatgagtgatgtcttcacagatgacaacgtccacagtaaaagatcagccaggtgcagtgacacatgcctgtagtcccagctatgtgggaggctgaggcaggagaatggcttgatcccaggaggcagaggttgcagtgatcccagatcacgtcactgcactccagcctgggcaacggaaactaggtctcaaaattaaaaataaaaaatcagccgggcatggtggcaggcacctgtggttccaattactttgaaggctgaggtgggaggatggcttgaccctgagggtagaggttgcagtgagctacgatcatgccagggtgctccagcctgggcaacaaagtgagaccccgtctcaaaataaaataaaatacatgaaaacaaacttactcaaagtacaaaatccattttttaaatgttcacaaaataataaaacctacacagactcacaaaaaactagatgttaatacaaagggttgtcatttgtcccagattttcaaaatataaaagattttcaaaatatatatgtgtgtgtacatatatatgtgtatgtacatgtgtgtgtgtacctatatatgtgtgtgtatatgtgtggggatgtgtgtatatatattatatacatacatacacatatatatgtattatatacatacatatacatatacatatatatatatatatatatatatataggttttaaatatataaaaagtagcaagttttgtttaagtgaagaggaatctcaccttggcggaaaaggacacattgacaactgggggctggggggaatcttgtcagatctaagaaaacaggaaatgccccatcctagaggaagcaatcaccctttcaactgcctggcctggaggatgaagaatcacttgaacccgggaggcaaagtttgcagtaagccaagatcatgccactgcactccagcctgggtgacagagcaagactccgtttcagaaacaaacaacagaaataataataataggtggaatgagaatatagctttatcctctagaataaaaaaaaagtactgctcccatatttgagaaaaattgtaatcatttttaccaaaagcctgtttcacgagcctctccatagtaacaccactgtctccatgagcgtaatatgctaagaatggttgaatgaatctcctgctattatttatgttgattccatattcttaacataatgatggaatcattcatgtatcattcatttccattatatttatttatttatttaagacagagttttgctcttgttacctgggctggagtgcaatggtgcaatctcaggtcactgcaacctccgcctcccgatttcaagtcattcttctgcctcagtctcctgagtagcagggattgcaggcacacaccaccatgcccagctaattttgtatttttgctagagacagggtttctccatgttggtcagactcactcaattacctaaaaatgtagtttaatatcaggcagaaaacatttcctcttatcggtcttttctagaatttaccatgttctttgtgcacattaatatgtgacttccattggcagctactctaatcttggtccacagaaaactgacagtgcatccagatgcggccctgaacaatccctgccgcccaacaccactgacaccataggaccctcaccccgtctccatccatgtctgtgtgtgagcccttcccaggaccatgcctactgcaacctcttctcatgttcatgtcattgggtcacgagagatggaatctaggtgagatgagagggactgagggaaggcatgggtgagtgtgagcaaacctgtcacgcaggatgcttcagactcagagaagtttcccaactccaaggcccagcatttctgaaaggaaggagacagaacaatccacagagaatatcatctcacctgaggaagagccatccctgactcctttgctttcctcttcctcttctgagtttcttcttcacatacccagagtctttagaagtcaatcatgaatgttagaaatatgttgtttattgctcagagtcaacataccccctccctgtaaaacaacgacacatacaaaggagacctcaccctgggaaatatggtccactctgctgcccaccataccagggacaataaactcctataggaaaactcccactccccttctggagaagcccacacacacgctgcagcagtagggatctgggctggaatgagctccccttcaaggcacagacccagacctgaccaaaccacttgcagaggctgggtgcggtggctcatgcctatcatcccagcactctcggagaccaaggtaggtacattgcttgagctcagaagtttgagaccagcctgggcaacatggtgaaactccttctctatcaaaaatacaaatacttagccaggtatggtggtgcacatctgtgtttctgtcaccccagctacttaggaagctgaggtggaaggatcacttgaggtcaggagtttgagaccagcctggcaaacatggtgaaaccctgtctgtaccaaaaatataaaaattgggtcaggtgcaatggctgaagcctgtaatactagcactctggaaggccaaggtgggtggattacttgaggtcagcgttcaagaccatcctggccaacgtggtgaaacctcatctctactaaaaatacaaaaagtagccaggctttgtgggcatctgtaatcccagctacccaggaggctgaggttggaggatcacttgaacctgggatgtgaaggttgcagtgagccaagatcacaccattgcactccagcgtgagtgacagaataagactctaaaataaaataaaatacaaatacaaatacaaaaattagccatgtgtcgtggcacacacctgtaatctcagctacttgggaggttgaggcacaagaatcacttgaacccaggagacagaggttgcagtgagccaagatcatgacagtgcactcacagcctggaggacagagtgagactctgtttgaaaaaaaaaaaaaatctccctctccctccccctccctctccctctccctctccctctccctctccctctccctctccctctccctctccctctccctctccctctccctctccctctccctctccctctccctctccctctccctctccctctccctctccctctccctctccctctccctctccctctccctctccctctccctctccctctccctctccctcctctcgctctccctctccctctccctccacggtctccctctgatgccgagccaaggctggactatactgctgccatctcggctcactgcaacctccctgcctgattctcctgcctcagcctgccgagcgcctgcgattgcgggcgcgcgccgccacgcctgactggttttcatgttttttttggtggagacggggtttcgctgtgttggccgggctggtctccagctcctaaccgccagcctcggcctcccgaggtgccgggattgcagacggagtctcgttcactcagtgctcaatggtgcccaggctggagtgcagtggcgtgatctccgctcgctacaacctccacctcccagccgcctgccttggccccccaaagtgccgagattgcaggctctgcccagccgccaccccatctgggaagtgaggagcgtctctgcctggctgcccagtctggaaagtgaggagcgtctctgcccggccgccatcccatctaggaagcgaggagcgcctcttccccgccgccatcccatctaggaagtgaggagtgtctctgcccggccacccatcgtctgagatgtggggagcacctctgccccgccgccctgtctgggatgtgaggagcgcctctgctgggccgcaaccctgtctgggaggtgaggagcgtctctgcccggccgccccgtctgagaagtgaggaaaccctctgcctggcaaccgccccgtctgagaagtgaggagcccctccgtccggcagccaccccgtctgggaagtgaggagcccctctgcccggccagccgccccgtccgggaggtgaggggcgcctctgcccggccgcccctactgggaagtgaggacccctctgcccggccagccgccccgtccgggagggaggttggggggtcagccccccgcccggccagccgccctatccaggaggtgaggggcgcctctgcccggccgcccctactgggaagtgaggagcccctctgcccggccacgaccccgtctgggacgtgtgcccagcggctcattggggatgggccatgatgacaatggaggttttgtggaatagaaaggcgggaaaggtggggaaaaaattgagaggccgggtggttgccgggtctgtgtggatggaagtagacatgggagacttttcattttgttctgtactaagaaaaattcttctgccttgggatcctgttgatctgtgaccttatccccaaccctgtgctctctgaaacatgtgctgtgtccactcagggttaaatggattaagggcggtgcaagatgtgctttgttaaacagatgcttgaaggcaaaaaaaaaaaaaaaaaaaaaaaaaaagaaaaaaaaagaaaaggaaaaaaaaaaaaaaaaggaattatttgtcacttactgtctctctaagggcagccattgtaagacctcaaagaaactttagcctccacaatcttttctcttaacctgaacatttcctttctatggatcccaggtttttagacaaactcaaccaattgtcaaccagaaaatgtttaaatttacctatagcctggaggcctgcccaccacccctttgagttgtctcgcccttctggaccaaacaatgtctttctttaatgtatttgattgatgtctcctgtctccctaaaatgtataaaaccaagctgcgccccgaccaccttgggcatgtgttcctgggaccccctgaggctgtgtcacaggtcagggtcactcatgtttggctcagaataaatctcttcaaatattaaaaaaaaaaaaaaaaaaaaaaaaaaaaaatcttcatttctgatgtggttgatgcagagataataaacctgagtaacgtgatagagactgatgggcagagggaacttcagatggcagtgggaggacatgggagatatctctgagcctagatctgaaggaggagaaagggacagggctgtcaccatttagggacataggataagagcaggacaatgacctgagacaggaagtattttgatatctgggaaaagagaaaagcaaatgtgactggggcagagggattcatgagatgggggcaagctcccaggaggaggctggacactggcaggggccctggacacagggctgtggagccacagtgaggagatgggcttttgtcctggggaacacaggaagccagtggagggttccctgccagggaatgacatgacttactttagatttagctgtgatgtcctcacagtgaaaacattttcaccgagttaccctgagaaggtctgagatgagtaagaagatgtgcctgaattcttacatgggggcctggaagggctaatgggaagggttggtctttatcaccccatccttgaaaattagagaagcatctttcacatacctgggctaaagaaacttcttttgcaaggttctgatgccattaattcctaacatttaatttttccttacaagaaaattacagtaacatttacaaaatgcaaaagtgtaaacacacagctattgaccttgaaaatagggaggccgaggtaggtggatcacctgagttcagcaattgtagaccagcctgacctacatggaggaaccccgtttctactgaaaatacaaaaattatccaggcatggtggcgaatggctgtaatcccagctactcagcaaggctgaggcaggagaatcacttgaaccagggaggtggcgattgcagtgagccaagatcgtgccattgcacttcagcctgggcaacaagagcaaaactgcatctcataaaagaaaagaaagaaagaaagaaagaaaagaaaacagggaaagagagtcagctgttgaactaagacagaagtaacttttttcattcaagaatacataggtggccaggtgtgatggctcacacctgtattcccagcactttgggaggtcgaggcaggtggatcacctgaagtcaggagtttgagaccagcctggccaacatggtgaaatcctgtctctactaaaaatacaaaaattagctggactccatccacagcttatttaacctcttgttgctccttttccccaatctttagattgttctcaatgtccatagatttccacctcttctcccatctctcctgagctctccctgttaaattctctcttccccgttatacccccctggccccactctctggcaccccagatttcccaggtgtcctccctgctgtggttctccctctgttctccttgccaccagcaccactctgctctgtctgccctggctccaaatccctcctcctctccctcattctcatgagcctttctgtttgctgcccctctccctaccttgctgtctgtccttcatctctctgtacatccagcttttctctacatttctccagttgcttttctcctcctgctttgttatcttttgttttttcacttttgctgtctcttggcaaatccctgaccatcccctactttgccatctgttatgggtctttctccttcttcttttatctgtctcaggttttctactgctctctgattccctctctctgtctcctgatccctttggcccacacaatcacaggagggtttggagtaagacgcctgcatcccagagaagcgcattttccaggggctggagctgggcaggcaagaacaccccgtgtcacaggacaggccccgggtacctccccaacgcgggctcagggaaagcggtgactgcggaggggagacttggggagcaacagggcccggcatgaggagggaggtgggggggagatgacgccttcggacaagggtggggtccgcaggatcccaccaccgggcagagaacgcggcctccctgggactgtggtgtcagcgctgggctccaggggccgacgagggtgaggctgggaagcgccagagcagggatccacctctcgggtgaggactttaaaaagcgcggggtgggaggagtcaacaaacggttgtgaacgggaaaactacgcgatacaaactgtatacattgccctatagcaaaaagaccgaggacagggcagcctcagggcgactttaaacccaaaaggaagtgacttccggactcctaggggaatgtctccatttgctcttgttgaaggaagaagggcgagaatttccaggtctgtggagaccccacatcccaggtacagaattgccggggacctggaggcacagcctcaatacaacacagagcaaaactcaccgccgcagtgtgacttccagtccacgcgatccgcttcctggtccgggcgaatctacaagcacaggacagaagccaggcctccgtggagccaacgaggtgggcggggcctgggcgaggtaggggcggggcctgggcgaggtaggggcggggcgccaggcggagagacctgccctgtagaaccggcagacgcggggcgggggcggatctgtgcttctctcagccgcgtacctagccgctgtttttcgggttttggtgagggaagagacagaccctctcatattgttttatattgttttatactcagtacctgttttaagaaaaaaaacaacaaggaagtaaaaccgaagacaggcagccctgcgccacgcccaaaaccaggcctgggcctgcctggcctaaacccaatagttaaaaatcaactcataacttagaaaccaatgtttttcatagattccagacattgtatagaagaacattatgaaactccctgccctgttctgtttctctctaccagtgcacgaaacccctgtgtatatatctgggactgtagtccctgttacgtatcccctagattgctcaatcacgacccttttatgtgaaatctttagtgttgtgagcccttaaaagggacagaaattgtgcacccggggagctcggattttaaggcagcttgccgatgctcccagctgaataaagcccttccttctacaactcggtgtctgagaggttttgtctgtggctcgtcctgctacaccggaggcaagagtggccaggaaggctgaggcatgattcaaaagccctggaattgtctggaacagggatgcaaactagaacgtgaaatgcaaagccctgcctaggcagaaagtacgatctcatgctgatggtacacagaacagaatagaaatctctccctttctattctccatttgcttcggagggagagtccaccctgtgctcagcttcagagacttccctagggccaccgcctgggatgccggagggagtgttcaggccagggaggagtgaggtcaccacctgctacttaaacacagcagaaatgtggaagtgggggcgggagcctgaggtccagctactcaggaagcagtggcgggaggatcattgagcccggaggtccaagccagcctgagtgacaaagtaacaccccctgccgcagggatcccttcctcatctcttttttttttaatttttaaaataaaattttcattgtgtgagatagggatccaactttattcttttccatgtggatatccagttagttgtcccagcacaattgtggatgacatctattagtttcttttttttatttacttttttttctttttcttttttttttttgagacagagtatttctctgtcacccaggctggagtgcattggcaagatctcggctcactgcagcctctgccttctgggttgaagcaattcttctgactcagcctgcatagtagctggtattacaggcacgtgccatcatgcccggctaatttttgttcttttggtagagacagggtttcaccatgttggccaggctggtctcaaactcctgacttcaagtgatccgcctgcctcggccttccgaagtgctgggattacaggcgtgagtcaccgtgccgggcccaagaaatactctttacttcactttttaaatgttgagaaaatacaattgaaaactaaaaaatcttccccagatgaaaaatcatcttcactatgataacagagaaggaaataacaaccattttattaataaagagccttagacctgaatgtaatgggaaatagaggcaaacagttgagaggttgaaaacagagagagaaacttcactgttctatacaacccattaagtacatgttttcttttgtcttttttctttcttttttttggagacaagagtctcactctgttgcccaggctagagtgcagtggcaagatctcagcttactgcagcctccacctcctgggttcaagcaattctcctgtctcatcctcctgaatagctggaactacaggcgtctgctaccatgctgggctaatttttgtatttttagtagagacggagtttgacctttttggtcaggctggtctcaaactcctgacctcaggtgatccacctacctcagcctcccaaagtgctgggattacaggcgtgagccaccgcgcccagcctaagtacatgttttcaagataaacactaatcagtcctcagggaagaggacttgacaatacccttggtcacacatagttcatcctggctctacttggtaatggaggtgaccatttgtgtcagctaattagcttcatcctgaggaaggggggaaaacgctaacccatgtctttttgacaagtgtgagttttacaacatggcgacaggtgccatctctagtgaggctcctacaatccgacagaaaccgacatcagcagtaaataataaaatttagaatacatgattaagtatagagtttatgtgaacacaaaacttgaggatagccacctggaaacatcaactccaaatgaagggggtctgtgttcccaagtagagatgttaaggtttcacacacagggaaagacagagaagctttaccagaatcaacacattttccattcaagaccagtggataagttgcagcaacttgactggtgatggattgatacagttcaagaaaggttactttatcactacataagaagggacaatcggccaggtgcggtggctcacgcctgtaatcccagcactttgggaggtgaggcgggcagatcacaaggtcaggagatcgagaccatcctggctaacacagtgaaacccatctctactaaaaatacaaaaaattagccgcgtgtggtcatgggcgtctgtagtaccagctacttgggaggctgaggcaggagaatggggtgaacccaggaggcggagcttgcagtgagctgagattgcacccctgcactccagcctgggtgacagagagagactccgtctcaaaaaaaaaaaaaaagaaaaaagagggacaatgatgtcaagaggtcttgtctctggggctgctcagtcttcctaattatctacaggaaaacttttgtgtttttttcttttctttttttttttgagacagagtttcgctcttgttgcccaggctggagtgctatggcactatctcggctcaccacagcctccgcctcccaggttcaagcaattctcctgcctcagcctcccgagtagctaagattacaggcatgcatcactacgcctggctaattttgtatttttaatagagacggggtttctccatgttgaggctggtctcgaactcctgacctcaggtgatctgcccacctcagcctcccaaagtgctgggattacaggcgtgagccaccgcgcccggccctctttttttatttttttgagacagtctcgctctgtcacccaggttggagtgcagtggtgtgatcttggctcactgcaacctccgcctcctgggttcaagcaattcttctgcctctgcctcctgagtagctgggactacaggtgcacaccaccatgcctggctaatttttggtatttttagtagagacgggggtctcaccgtgttagccaggatggtctccatctcctgacttcgtgatgctcccgccttggcctcccaaaatgctgggattacaggtgtgagcctctttgcctggccaaaacttttcttttttaaattgatattaggaaactgaattatatagcttttttttttttttttttttttttttggtacggagtcttgctctgttgcccaggctggggtgcagtggcatgatcttggcccactgcaacttccacctccccggatcaagcagttctcctgcctcagcctcccaagtagctgggaatacaggcgtgccccaccatgccctgtaatggctttgtatgtttactggagacggggtttcaccacgttggccaggctggtttctaactcctgacctcaagtgatccgcccacctcggcctcccaaaatgctgggattacaggcttgagccactgcgcctggccaggaaaactcaaaaaagttgcgcctgcggctgggcgcggtcattcatgcctgtaatcccagcactttgggaggctgaggtgggtggatcacaaggtcaggagatcaagaccatcctggctaacacagtgaaaccctgtctgtactaaaaatacaaaaaattagccgggagtggtggtgggtgcctggagtcccagctactggggaggctgagacaggaaaatgacgtgaacccaggaggcggagcttgcagtgagctgagatcgcaccactgcacttcagcttgggcgacagagcgagactgtctcaaaaaaaaacaaaaaacaaaaaagaaaaaaccttgtgcctgcatgccactggactcttgttgcatgaccacgttcctctcaaggctcagaattatttaaaggtcggtagcttttaatttgaaacatttgatgtttgaattatttaatttcctactaagatacaggtactatctcccttgtttgccttaaaaggatcgctcccaagtccttcagaaatacatccctgggtcattaaactgaaaaaaggtttagttactttctaaaaaataccacttcaggccggacgcgtggctcaagcctgtaaatccagcgttttggaaggccgaggcgggtggatgacctgaggtcaagggttcaagaccagcctgaccaatatggagaaaccccatctccactataaatacaaaaattaaccaggcgtggtggcatgcacctgtagtcccagctacttgggaggctgaggcaagagaaacgcttgagcccaacagacagagggtgcagtgagccaagattgcaccattgcactccagcctgggcaataagagtgaaactccgtctcaaaaacaaaaaattaataacaataataaataaggccagtgcagaggctcgctcaggtgagactccgtcttaaaaaaaaaaaaaaaagaaagaacactaccacttacacagtagggcattctcaaaaacaagggcaacgccacctcttttaagttttgtctttcaagatgtgatttgcgactgaaaactttttcacattcttcacatttgtaaggcttctctctagtatgaagtctatgatgacgtgcaaggtgtgctttctgattaaaaaccttgccacattcattacacttgcaaggattctctccagtatgaattgccttatgaattacaagggctgaatttcaaccaaaggtcttgttatgctcactacacttgtaaggtttccctccagtatgaagtctacgatagcatgtaaaggatgacgtctgactgaaggtcttgccacactcataacaactgtaaggtttcttaccagtgtgacatctattatggcatacaaggaatcaattctgattaaagaccttgtcacatacctcacatttatattgtttctatcctaaatggattatctgatatttccttaagagttagctataattaaaggatttgccactctcattacattggaaagatttttctctcatgtgtacttcccaatttttgtatgggtaatgaagaatggagggaattattcccatagttattagaaatacgggttttgggactacaagaaattctttgggatgtcaaaattaaggaggcattgatgatagacttctcaacttgattaccaattttccattcaggctgaaatatgtggagttcaggcagatgcgaatgaaagctggatccaagctgatctttaataggcttgtttccagcatgcctttgatcatgtcggtctgtactaccagtcaactctttgatttctgtcatgggtgcttcgtgaccattcctttcctcttcttgccactgaaactcaaagttatgaatatctttctcaatttcctggaagcaaaaatctctaatgtgatgactttcatgtctttgcaatgtccctgtgtggatcacttctgtattgccttgcgctgtggatgagaactccttcatcatgcatttggaagagatatctacaaaatataaacaccaataggtttctaattaagtacagatgataaacaatactgaaatgtgtaaatatgaaccaaaaaaacaattcttattttaaactttccaaacatgagcttcaaagtttaggaacacaaaaggagtaagattctataacaaataaagggtgatagcatgtacttcaagtcatttctatggaagcctatttctaatatcatgacaaaacactgacagggcacaaacatgtgtaagcctaaagtatggagtgtttttccactgtgaccctaaagtgtatgagagtttgcaaaaaacatatcactgtctatgaaagaagaaaaaaatgtattcttcatacttacagcatatttactgtatacaaataaatgctgtaggaccatacaatatactatattggtaaataatccacaacaagctcatgtaaggataatcaaaatcaatggaaattctgtattgtcaaacaatcatagcactgagaagataacaaaagattacaaaacttagccttgtgtcatggccggcacctgtattcccagctactcaggaggctgaggcagaagaattgcttgaacctgggagggagaagttgcagtgagccgagatcgcaccactgcaattaagcctgggcgacaaagtcagactttgtttcaaaaaaaaaagaaaacaataaaagaaaatgttaatacaatatttttctagataaatatcataaaattacctttatccatgcagaacaggcactttgtgactttaaaaaaatttggtagttttatttttttgagacagagtcttgcactccaggctggagtgcaatggcaggatctcggctcactacaacctttgcctccacggttgaagtgattctcctgcctcagcctcctgagtagctgggattacaggcacacgccactatgcacagctaatttttgtatttttagcagagatggggtttcaccatgttggccaggcaagtctcaatctcctgacctcaagtaatccacacgccttggctccccaaagttctgggattacaggtgtgagcctctgtgcctggtggcactttgtgacattaacaagtggaatgtgtcagttatattgcataccagatacttaaaagccatatgtaaaatcagaaaaattaataatatattgtaacccatgataaaaccagcaagaaaataagtacatttatatagcctgcagaattgtaagcaattctctcttaagaaaaagtccacaatgtctacttaaccaccagcacaccatataagacctgaaatacatattaagatcactaccttctagaccaggcatggtggctcacgcctgtaatcccagcactttgggagaccgaggcaggcggatcacaaggtcaagagatcgagaccatcctggccaacatggtgaaatgccgtctctactaaaaatacaaaaattagctgggtgtggtggtgtgtgcctgtaatcccagctactcgggaggctgaggcaggagaatcacttaaacccgggaggtggaggttgcagagagccgagatcgcactactgcactccagcctggtgcagagcaagactccgtctcaaaaaaaaaaaaaagcccactaccctctgatgtaggaggtcaagaaaatacacaacaatgctgggcacggtggctcacacctgtaatcccagcactttgagaggccaagtcgggcagatcacgaggtcaggagatcgagaccatcttggctaacatggtgaaaccctgcctctactaaaaatacaaaacgttagctgggcgtggtggtgggcacctgtaggcccagctactcagaaagatgagacaggagaatggtgtgaacctgggaggttgcagtgagccgagatggcgccactgcactccagcctgggggacagagctagactctatctcaaaaaaaaaaaaaaaaaaaaaaaaagaaagaaagaaagaaaagaaaagaaaagaaaatacatagcattaaaaggaataagaattgactaacggccgggcacggtggctcacacctgtaatcccagcattttgggaggctgaggctggcggattatgaggtcaggagtttgagaccagcctggccaacatggggaaaccccatctctactaaaaacacaaaaaaatcagctgggcatggtggtgggcacctgtaatcccagctacttgggagactgaggcagttcttgtgggtggaggattacccgggtgccgaggcaagagactgaaggcacaaaccatttcagtataataaagaaaatagttagaataagaacaatcacaacacaaattagatacagagatgatcatggacaattatcaatcattattataaacagtataaatctttagcttttaatattactctttgtggcattactaatataacctaggaataactggcgggtatagggtcaggtgctgaagggacatggtgagaagtgacctagaaggcaagaggtgaggcctctgtcacacccgcataagggccgcttgaggggtccttggtcaagcggtaacgccagtgtctgggaaggcacctgttacttagctgaccgcgaaagggagtctcctttccttggaggagtcagggaacactctgctccaccagcttctcgtggaaggctggatattatccaggcctgcccgcagtcatcccgaggcctaaacccctccctgtggtgctgtgcttcaatggtcaagctccttgtccactttcatgctcctcccgtactcctggctcctctttgaagttcatagtagatagcggtagaagaaatagtgaaagtcttaaagtctttgatctttcttataagtgcatagaagaaaatgctgatgtatgctgccttctctctctgcttcggctacctaagagggaagggccccctgtcccgtgatcacgtgactttcttcaccttgtcaatcacttagaagattcaccctgcttaccctgcccccttgtcttgtatgcaataaataccagcgagcccagcctttctgggccactaccggtctcctcaacttgatggtagttgtctcccaagcccagctgttttctctttatctttttgtcttgtgtctttacttactacaatctcttgtctctgcacacggggtgaatacccgctaagccccatagtgctggaccctataagttctatatatatgcattgaagggggcctgaccctccacacctgtgggtatttctcatcaggtgggatgagagactcagaaaagaaagaagacacagagacaaagtatagagaaagaacagtgggcccaggggaccggcacactcaacatgcaaggacctgcatcggcgccagtctatgagtttcctcagtatttattgatcattatttttactattttagcgaggggagtgtagtaggggaacaagtggggagaaggtcagcagggaaacatgtgagcagaggaatctgtatcatgaataagttcaaggaaacatactgtgcctggatgtgcaattaggctagatttttgtttctcttcacccaaacatctcagtgtaggaaagagtaaaagagcagtattactgccagcatatctcgcctccagccatggggcgcttttctcctgtctcagaagagaacgaatgggaatggtcggctttacaccgtgacattccattcccacggatgagcaggagacagaagcctttctcccttttttttttttttttttgagatggagtctcgctctgtcgcccaggctggagtgcagtggcacgatctcaactcactgtaagctctgcctcccaggttcacgccattctcctgcctcagcctcccaagtagctgggactataggcacccgccaccacacttggctaattttttagatttttagtagagacggagtttcaccgtgttagccaggatggtctcggtctccttttcccgtgatctacccgccttggcctcccaaagtgctgggattacaggtgtgagccaccacacccagcctacagaagccttcctcttttctcaactgcaaagaggccttcctctttcactactcctcctcagcacagaccccttatgggtgtcaggctgggggatggtaaggtctttcctttcgcatgaggccatatctcaggctgtctcagtgaggggaaaccttggacaatacccaggctttcttgggcagaggtccctgcggctttccacagtacattgtgccccttgttaatcgagaatggagaatggcgatgacttttagcaggcatactgcctgcaaacatattgttaacaaggcacatcctgcagggcgctgtggctcatgcctgtaatcccggcactttgggaggccgaggcagacagatcacgaggtcacgatatcgagaccatcctggctaacacggtgaaacccgtctctactaaaaatacaaaacaaattagtccggcatggtggcgggcacctgtagtcccggctactcaggaggctgaggcaggagaatggcatgaacccaggaggtggagcttgcagtgagccaagattgtgccactgcaatccagtctgggagacagagcgagactccgtgtcaaaaattaaaaaataaaaaaaaataaaaaaaaaaaaaaacaaggcacatcatgcacagccctaaatccattaaaccttgattcagtacagcacttttctgtgagcacagggttggggctaaagttacagattaacagcatctcaaagcaaaacaatttttcttcatatggaccaaaatggaatttcttgtcttccttttctacatagacacagtaacaatctgatctctctttcttttccccacaatgcattgcccttatatagtttgctatgcataaaatgcaaaacatagaatgtgtactgggaaaatttataaactgagtcagagaaaactttgtagaaaacaaactgcacagcaaaaacaaaaaatatgatgcaggctatctggcctaaatgtttgtattggctaaaagtcattatcagatttcttattctccgataggatgttcctgcagatgaggccttttatagaatttggtcttctgtgttgactgttcatgaataggactaatgcttttatttttattttttctttatttactgatttttgagacggaattttgctcttgttgcccaggctggagtgcaatggcatgatcttggatcaccacgacctcggtctcctcagttcaagcgattctcctgcctcagcctcccgagcaactgggattacaggcatgcgccaccacgtccggctaattttgtagttttagtagaaacgtggtttctccatgttggtcagtctggtctcgaactcccgacctcaggtgatccggctgcctcggcctcccaaagtgctgggattacaggcaagagccacggcgcctggccaggactagtgcttttataaaaaagagacagtaaagtgttcattgcctgttcctctttacaccatgtcaggacacaggaggaagatggctggacgaaaccatgaagaaggatctcaccaggaaccaatctggttgaaatcttgctcttagattttccactttccagattcatgagaaataaatttctgtgtctgaagctttctagtttacactatttctttttttgtctgtttttgagactgagtcacgcttcatcacccagactggggtgtagtggcacgattctcctgcctgaggagattctcccgcctcagcctctggagtagctgggactaaggcacacgccaccacgcctggttaattttttttgttgggggggggagacagagtctcccactgtcacccaggttggagggcagtggcacgatcatggctcactgcagcatagcctcccgggttcaagtgattctcctgtctcagcctcccaaatagctgggattacaggtgcaccaagctcagctaatttctgtatttttagttgagacagggtttcaccatgttggccaggctggtcttgaacttctgacctgaggtgatctgtctttctcagcctcccaaaatgctgggattacaagggtgagccattgcgctcagccaattttattttcatttagtagatttgaggtttcattatgtttgtgcaactggtctcaaaatcctgacctcaagcgatctacccacctcggcctttcaaagtgctggaattagaggtgtgagtcaccgcggctggctagtgtaagctatttctgacagaacagtgaaatgagcgagacaggaaaagaggcatctcatcaccaacatcaccgaaggctgacaaatcttattaaacaaaaaaagtttacagtctgtaccataaaacttccaatatgtgaagcaatctaaaagcattaacttttaaaaaccaggcgggtgaatcacttgaggttgggagttcgagactagcctgaccaatatgtagaaagttcatctctactaaagatacaaaaattagccaggcactgccgggaacggtggctcacgcctgtaatcctagcattttgaaaggccgaggcgggcgaatcacgaggtcaggaattcgagaccagcctgaccaatatggtgaaaccccatctctactaaaaatattaaaaaatagccgagctctgtggtgcaccgtgaggaaaagcaagagagatcagattgttactgcgtctacgtagaaaaaggaagacaaaagaaattccactttgatctgtactaagaaaaattgttctactttaagatgctgttaatctttaacttttgtcccaaccctgtgtcacagaaacatgtgctgtattgactcaaggtgtaatggatctagggctgtgcagggtgtgccttggtgaaaatgtgtttgcaggcagtatgcttggtttaccactgccattcattgccattctccattctctattaaccagagacacaatacactgcggaaggccgcaggaaaccctgcccaagaaagcctgggtattgcacaggtctcccccgactgagacagcttgagatatggcctcatgggaagggaaagacctgactgtcccccagcctgacacctgtaaacggtctgtgctgaggaggattagtgaaagaggaaggcctctgtgccattgagataagggggaagcatctgtctcctgcacgtctctgggaatggaatgactcagtgtaaaaccgaccagacattctattctgagataggagaaaaccgccctatggctggaggcgagacatcatggcggcaatactgctctttactgcactgagatgtttgtgtaaagtcaaacataaatctggcctacatgcacatccaggcacaacacctttccttaaacttatttatgacacagagtcttttgctcacatgttttcctgctgaacttctccccaccatcaccctatagtcctgccacattcccctctccaagatggtaaagatagtgatcaataaatactgagggaactcagaggccaatgccggtgcaggtcctcacttgctgaccgccggtcctctgggctcacttttctccctctgtactttgtctcttttctcagtctctcacctccaccttgtgagaaatatccatgggtgttggagggacaggaccccttcacaaagtggtagaactatgggcgtgagccactgcacccagctacacatttacattatagcatcttgaccttcggctccccagctgccttgtgactcggtgtgtgtgtgtgtgtgtgtgtgtgtgtgcatgctcgcgtgttgtgacaggcaagaaaaagccactagagcatcatcgccactggcctggtaggaggaggttgcccttgggctgcagttcactgtgctgtttgcactcttgatccttggaagaatcttcctgaagtcacggagcctccagctcctctggaacagaactagttgtgtaggagtgtgtccttcatgccctcaggtccctgaccttctccccacccttcctgaagggaatccagaacccctgactctgagctcatcacctgcttgtggcaaagtccctgcccataacggccaaactgggtcctggtgatgtgcagagcacggaagacccaggagctggagtaaggcagtggcacaggtgataaaagtggggatgcctcggcactgcctgaggacacagggtctggcctgtaaggcttttctgaccctagtgaggccttctcttcttattttgactgaaataaatagccacaggaagttcagatcaattagagttgaaatttcaagaagaaatgtgggaccatcctcacacttgccccaggccctgagtcttccctgaggatgcctcagcatctgaactataaccccagagtaggtgctgcagttgtcctgtggccaagatgagaactgtgcatccttcagtgaagggagacacaaaattttcaaaataacccatgcagaaaggtgtttctgggtgggcacggtggctcccgcctataatcccagcacactgctaggccgaggcagacagatcacctgaggtcacgagttcaagaccagcctggccaacatggtgagaccctatctctactaaaaatacaaaaataggagcaggtgagttggctcatgcctgtaatcctagcactctgggaggccgagacaggtggattacttggggttaggagttcgagaccagcctggccaacatggtgaaaccccatctctactaaaaatacaaaaagtagctgggcttggtgggtgtctgtaatcccagctactcgggaggctgaggcaggagaatcgctttaacctaggaggtggaggttgcagtgagccaagatcgtgccactgcactccagcctgggtgacagattgagactcaaaagtaaaataaaattaaattagaattaaaatacaaaaattagccaggtgtggtggcacacacctgtaatctcagctacttgtgaggtgagacacaagaatcgcttgaacccaggagacagaggttgcagggagagatgtcatgagactgcactcacagcctggatgatagagtgagactctgtctcaaaaaataaaaaaataaaaagagcatttctgatgtgactgatgcagagataataaaatctgagtaatgtgatagagactgacaggcagagggaacttcagatgggggtgggagggcatgggagacatctctgagcctagacctgaaggaggaaatagggaaagggccatgataatttagggacatagggtaagagcagggacaatgaccagagacaggcaggattttaatttttgggaaaacagataagcaaatgtgactggggcagagggagtcatgagatgagggcaagctcccaggaggaggctggacactggcaggggccctggacacagggctatggagccacagtgaggagttgggctttcaacatttgtccacatggaccagagggccttgagggaaacatgcacttaatagctcacagctcaagattttaacaatgacataaggaaagaaaactgaaaaacagactaactggttaaaccacattttgatgtcaaaggttgccaataaataataaagagtagaaagcatgcagacctcgatctgaaccggacgcaactaatttcaaacagaaactactttgaaattgttttgtaaaactcgaacaaattcagatgtcaacgggaaaataactagaacatatacttgtacagaaaggaatgatgtgagctgattataggatgccacaaaggcatctttcagaagaagtgattatggattaaaaaaggaatttttaaaattaacatttatctcaaactccaaaaaaaaaaaaagaaagaaaaaaaaaaagaaagaaatgaagaggaaccagaaagaaaaaaaggaaatctattacacaacgagaacaaaagcacttttgatgtcccttttgttttttaattttttgtttttttttttttgagatgaagcctcgctctgccccccaggctgcagtgcagtggtatcatttcggttcactgcaacctctacctcccaagttcatgtgattctcatgcttcagcctcccgagcagctggaactacaggtgcacgccaccacgcccactttactttttagtgtttttactagagacggggtttcaccatgttggccagaatggtcttgaattcctgaccttagatgattggctcccaaagtgctgggattacagtcatgagccaccacgcccaggtttgatgtgccttttttttttttttttccatttttcttttttgagatggagtctcactctcgcccaggatggagtgcagtggcgcaatcttggctcattgcaacctccaccttccaccttcaagtgattctcctgcctcagcctcctaagtagctggaattacaggcacgtgccaacatgcccaggtaatttttgaatttttaggagacaggatttcaccatgttggtcaggctggtctcaaactcctgaccttgtgatctttgtgatccacccgcctcagcctcccaaagtgctgggattacaggcgtgagccactgcaccctgatgtcccttttaaaaagtactatgggatgggcatggtggctcacgcctgtaatcccagcatttgggagactgaggtgagcgatcacctgaggtcgggagttcgagagcagcctgaacaacatggagaaaccccatctctactaaaaacaaatttagctgaacgtggtggctcatgcctgtaatcccagctactagggagactgagacagtagaatcgtttgaactcgggaagtggaaattatggtgagccgagactgtgccattgcactccatcctagacgagagcaagattccacctcaaaaaaaaaaaaaaaaaaaaaaaaaaaaaaaagactctgtaggccaggtgcggtggctcctctctgtaatcccaactgtaatcccagtaatttgggaggtcaaagcagaaggatcctttgagcccagaattttgagaccagcctgggaaacatagtgaaaccccttttctacaaaaaaaaaaaaaaatacaaaagctagccaggcttgatggctcatgcctgtggtcccagctactcgggtggctaaggtaggaggatcgcttaagcctaggaggtcgaggctgcagttagaggagatcatgccactgcactccagcctggccgatacagccagaccctgtctcaaaatattaattaattaattaaatttatactattatatgataacagaaagtgatttttttctcccacttcactgccccacttcctattccatcctgggaaaagggaagagagtgtctaacaagtgaatgaagacacaaccctctggctgaatagggattccaactggaagctaacctctgatgccaagatttatagaatgtacatgtctcatagataggaattttaaaattctcaatctcatctgtataatttaaacaagttttaagttattaaactacatacatagaagtcagcatgtcacaacgaatcatatctaatgaactcacccactcatctgaacccaaagttccccgcccctttttttcttttgagacagggtcttgctctgttgaccaggctggagtgcagtggcatgatctcggctcactgcaggctggacctcctgggctcaagtgatcctcctgcctcagcctccagagtagctgggattacaggtgtgtaccatcacatccagttaattttttttttcttttggcagagatgggggtctcactatgttgcccaggctggcctcgaactcctggactcaagcaatccccttgcctcagtctcttaaagtgctgggattacaggcgtgagccactgcgcccagcccctctgtcttcattactgtgcttccctccctaattctgtacatatctctcattctccccttctctctctagctcttgttttcttttctttttccctgggattctgctcttcattttgtacccctctcctctcctgctgtttatccccttcttccctctattacttctcttccacctcttctgctccatcgtcgcaaattctttaacctcttgttgctccttctccccaatctttcgatcatcctcaatctccatatatttctgcctcttctcccatctctgcgcctcctctgctctccctgttaaattatctcttccctgttaaatccccctttccccaatctctagcaccccagatccccaggtgtcctccctgctgtgcttctccctctgttcttgccaccagcaccactctgctctgtctgccctggctccaaacccctcctcctctccctcactctgatgagcctccctctttgctgccccctccctaccttgctcttcttcatctctctgtacatcaagcttttctctacttttctccagttccttttctcctcctgtttttcttatcctttttttttttttttttttttccacttttgctgtctcttggcaaatccttcacccatcctctacgctaccatctgttatggcctttctcattcttcttttctctgtctcaggttttctactgctctctctctcagtctcccgatccctttggccaacacaatcacaggagggctttgaagtaagatgcctgcatcccggaggagcgcattttccagaggctggtgcagggcaggcaagaacacacggtgtcataggacagccccgggcacctccccaacgcgggctcaggagaaacggtgattacggagggaagacctggggagcataagggcccggcacgaggagggaggtggggggcgacggcgccttaagacaagactgggaggcgcccagggcgggaatccgcctcgcggtaaggactttaaaaagtgcgggttgggaggagtcagaaaaaagttttgagcaggaaaactacgcgatgggaagtgtatacgttaccctatagcagaaagattcgggacgggaccggtctatggtgactttaaacccaaaaggaagcgacccccagactctcacggggacttctcaatttgctctgggtaaagaaagacggaggagaacttccaggtctatgaggaccccacgtcccaggtacagaagcgcctgggacccgggaagcgcagacttaacacaacacagagcaaaactcacccccgcggtgggaccgtcactccacgcgacccgcttccgggtttgtgcgaatctgctctctggggacagaagccaggcctgggcgggacccgcggggaggtaggcggggcctgagcgaggtaggggcggggcgcgaggcggagagaccttgcccttcagaacagacagagggcggggcgggggcggggccggggcgggacctgtgcgtctctcagcctggctcccagagcctcaatttttcgggttttggaggcgagaccggccaggaaggctgaggcatgattcaaaagccctggaattgtctggaaggggatgcaaactagaatgtgaaatgcaaagccctgcctgggcggaacatacgatttcatgctgacggcccacagaacagaatagaaatcctctccctttctattttccattcactcaggagggacagtccaccctgtgctcagcttcagagacttccccagggcctccgcctgggatgcgggaccgagtgctcaggccagggaggagtgaggtcaccacctgctgcttaaacacagcaggaatgcgggcgcgggggcggaagtctgaggtcccagctgctcaggaagcagcggcgggaggatgctgagcctgggggtccaagccagcctgggcgacaaagtaacaccgcctcccgcagcgctcccttccttgtctctctctctttttttttttaacttttttttaaataaaatttttgattttgtgagatggggatccaacattgttatttttcatgtggatatccagttagttgtcccagcacatttgtggaagagatctattactttcatttttatatttacattttttcttttctttccttttttgagacagagtatttctctgttgaacaggctggagtgcagcggcgagatctccgccttactgcaaaattcacctcccggattaaggtagttctcttgcctcagcttcccaactagctgggattacagatgcgcgccaccaagcctggctaattgttttgtatttttagtagagactggggtttcatcacgttggccgggctggattcgaactcctgacctcaagtgatccacccgccttggtctcccaaagtgttgggactacaggagttagccaccgcgtctggccaggaaaactcttagaagttgcgtctgcagccgggcgccggtggctcacgcctgtaatcccagcactttaggaggctgaggcgggcggatcacgaggtcaggagtttgatgccagcctggccaatacggtgaaatcctgtctctactaaaaaatacaaaaattagccaggcgtggtggtgcgtgaatgtagtcccagctacttgggaggctgaggcaggagaatcgcttgaacccaggaggcggaggttgcagtaagctgagatcatgccactgcactccagcctgggttacatagtgagactacgtctcaaaaagaaaaaagaaaaaagaagttgcgtctgcataccacaggacacaggttgcatgaccacattcctttcaaggctcagaattatttaaaggtccatacctttaaattgtttaaattggaattatttgatatttcaaacgtttaatttcctactgagttacaggtaccgtctctcttgttgtttgcctttcaaagagagaccccaggtccttcagaaatacatccatgggttattaagctgaaaaaaagtttaggttgtttctaaaaaataccacttcaagccgggagcggtggctcatgcctgtaatcccagtgtcaaaccaccgaggcaggcagaacgcctgagatcaggagttcgagaccagcctgaccaacatggagaaaccccgtctcttgtgaaaatacaggattagccgggcatgctggtgcatgcctgtaatcccggctactctggtggctgaggcaggataatcgtttgaaactgggagacagagattgcggtgagctgagattgcatcattgcactccagcactggcaataagagcaaaactctgtctcaaaaaaaaaaaaaaaaaaaccctcagaagtgaagggggcctgcccctacacacctgtgggtatttctcgcaagatggagatgagagactgagaaaagaaataagacacggagacaaagtatagaggaagaaaagtgggcccagcggaccagtgctcagcatacggaggacccgcgccggcactggtctctgagttccctcagtatttattgatcactatctctaccatctcggagagggggatgtggaaggactatacggtaatggtggggaagggtcagcaggaaaacatgagagcaaaggactctgtcataaataagtttaaggaaaggtgctgtgcctggatgtgcacgtaggccagatttatatttgagtttacacaaacatgtcagtgcagtaaagagcagtattgccaccatgatgtctagcctccagccataagatggttttctcctatctcagtaaatataatgtacgatcgggttttactctgagacattccattcccagggacgagcaggagacagacgctttccttttatttcaactgcaaagaggcctttatctctcactaatcctcctcagcacacacggtttacaggtgtcgggctaggggatataaggtctttcctttcccacaaggccatatctcaggctgtctcagtggggggaaacctggacaatacccaggctttctcaggcaaaggtccctgcggccttccacagtgcattgtgtccctgggtaaccgagaatggagaatggcgatgacttttaccaagcatactgccagcaaacacatttttaacaaagcacatcctgcccagccctaaatccattaaaccttgagtcaacacagcacatgtttctggagcacagggttggggctagggttacagattaacagcatctcaaagcagaagaatttttcgtagtacagatcaaaatggtgtttcttatgtcttcctttttctacatagacatagtaagtctgatctctcttttccccacacagaagacagagaaaatgcatttacaaattttctaaataaatgtcccaagaaaagaggcaaaaaaaaatcttttttttttcaaaggaggaattatacctctatttccttgtttgtttgagacagggtctagctctgtcacccaggctggagcgtggtggagagattagaactcactgcagccgtgaaatccctggctcaagtgatcctttcacctcagcgccccgagcagctgggaccacaggcgcacaccaccacacctgactcgttttttgatttttagtacagacaatgtctcactacgttgccccggctgatctcgaactcctgggctcaagcaatcttcctgcctcagcctctcaaagtgctgggattacaggtgtgagccaccgctccgggccctgactttatttccatgaaatatgaaacccctatcctccacctcctgtgtgtaataggcagttttgcttgtcacttttcagtttccattatccactcaaacaacccaggaccttgcttagtttaataagccgttctgtcagttcccgctgcaaccagcgccccactccacccctttaccgaggtccctgcccctctcccccgccctgccccagactgaggggagctcgccccgcctgcaggacgcacgactctacctgctccaaaaaggcgctttgcattaaaaccattttcaatttaagaagagaaactattcagcgttcagcacacgtggtctactacaataagttgttttaccttcgattgtttgaaatgttaacttaaaacgggcaggaagcatccatgtgatattaggggtaacatcacggcacaagagaatgaatccaccaatcagaactcggaggatccagtcctagagggagaggatgacagcaggagacatccacggcccagctgagaaagcccgaacccgccccctccaggcctggccctttagaacaacccaccttccagagcccgccccctagacggcgtcaaccctctggcctggctcctgcccgcagtccggcccggcccccaggcagccttctcccttttgccccgccccaggccccgcccccacagcggcctccactctctcgccccgacccagcacctgttcaggccccgcccgctcagcaaccttttctctcctgccctgtccccgcttagtgtccagaaccctcccagacagggtccaggaccagcccatggttgttctgcacggagagcccggggctgacgcaggtgagtgattttttgtctttctgcttcaaacctgcctttctcagcaccccagcccccagtccagccataccaggaatttgggtgcgtcgggatgttgaaatccccacgcgagtttgtgcagttgtcagggagtcccagcttcgccatgggaagctcgcagacccggtggctctgcagcgtttgtatcgttttagcccatgtcctccccctttcaggtggcaaaatctcggctcaccacaatctctgactactaggttcaagcgattctcctgcctcaggctcctgagtaactggaattacaggcgcccgccactacacccagctaattttgtatttttagtagagactaaaaatgttggttacaccatgttggttatgctggtctggaaaacccaatctcaggtgatctgcccacctcggcctcccaacatgctgggattacaggcgtgagccactgcgcccagcctctaggtagctttttttagtctttgtagctatgttgtttaggaataaaatgggaggcaggtttttctgtcccaattcccagcttgacctttctctttggcttggtaatttttattatcctttcacaagctcagacagacataatgctttgacacaatgatattgctttatatagattttccacatcaataaagtccaagggtctgtcatgaactgggttagaagagacgagaagattcccaggagactcagtctcaagcaatcctcccacctcagcctcccaaggtgcgtggaccacaggtgtgatccactgaacacagtggagtctccagctcaaaaaaacaaaacaaaggttaaggtactctatcgaattacgtcatttgacttattttatttttattttttatttatttattttttttctgagatggagtcttgctctgtcaacccaggctggagtgcagtggcgcgatctcagctcactgcaacttccgcctgccgggttcatgccattctcctgcctcagcctcccgagtagctgggactacaggcgcccgccaccacgcccggctaattttttgtatttttagtagagacggggtttcaccatgttagccaggatggtctcgatctcctgaccttgtgatccacctgccttggactcccaaagtgctaggattacaggcgtgagccaccacgcccaattgacgttttttttttttaaataaaatgtttcacatatttattaccgaacctagccaaccaatgtgttcgtaacagagtcagagataaaaaatatattcccaataaaacatgtccaactctccagataggggtgacattttcagcttgatatggttgcgtgattgtgaccttattatcagttttcatgcgaatccactggggaatggaacaattctgcttttgtttcttggccaggactctcttaatcctgaaagtcttgtgagaagacatggcaagaagccaagtcaagcacacactacgatgacggagagaggagaagggtcttgattttttcttttttttagactaagtttctttctttttgcccaggctgcagtgcaatggtgcgatcttggctcgctgcaacctccgcctcccgggttcaagtgattctcttgcctcagcctggcgagtagctaggtttggccaaaatatgaactagaaaggcaggaacctggccaaaggtggggagcttgaatgttattaccttattcctgcttgacctttactgccaacgccaacacaaatggtcagaggtcccttatatgaaaatcttcatgatcttgtgggaaaaccctgatttttgtaaaggctgcaaaacaggctcaaaaataaataaataaataaaattacatttaaaagagccagttgcagtggctcacgcctgtaatcccaccactttgggaggccgaggtgggtggatcagctgaggttaggatttcaagaccagactgaccaacatggagaaacaccctctctactaaaaatacaaaaattagccaggcttggtggcgggcacctgtaatcccagctacttaggaggctgaggcagaagaattgcttgagcccaggaggcaaaggttgcaatgagcccagaccataccactgcactccagcctgggtgacaagagcaagactccatctcaaaacaaaaaaataaaataaaataaaaaataaataaaaatacaaaaattagcatggtgtggtggcatgcatcactaatcccagctactcaggaggctgaggcaggagaattgcttgaatgcaggaggtgaaggttccagtgagctgagatcatgtcattgcactatagcctgagtgacaagagcaagactccatctcaaaaaataaaaataaaaaacaggctgggtaaagtggctcaagtctgttggccaggctggtctcaaactgctgacctcaagtgatctacctgccttggcctcccaaagtactgggaaaacaggcatgagccactgcacctgacccattcttcttaacattaacactttttatgtcaattaatgcgtgaactcaatgttaagtcaactcaaactcaagtcaatgttgaatcaactctaatgtcaattaaagttttatgattttttatattcattttatttggaacaattatctcaaaaatgaattttctgatgttctgcatggaatgaccacagagtgaagaccttgccacccttacatttgtaaggcatctgtccagtatgaattctctgatgtctaatgaggtgtgaacatgaagtaaaggctttgccacaatcatcacacttgtgaggtttctctcctgtatgaattctatgttttgcataggatgaagcttgactgaagaccttgtcacagtcatgatatttgtaaggtttctctccagtatgagttcactgatgaactacaagttatgaatgacgtctgaaaaatttgccacatttattacacttgtagatctctcttcaatatggattctgtaatgatttgcaatggttgtagcattactgaagactttgtgacaatcattacatttgtaaagtttccctacacccatggattgcttgatggtgaataagtgttgactgtccagtaaaggctttgccacactcattacacttgtaaggtttctctgcagtatgaactctctgatgttttgcaaggcttgctttttgattaaaaaccttgccacattcattacacttgtaaggtttctctccagtatgaactctctgatgttgtgcaaggattcctttttgattaaaaaccttcgcacatttattacacttgtaaggtttctctccagtatgaactctcgtatggtttgcaaggcatgaatcactccggaaagccttgtcacaaaccttacatttgtatggtttttccccagtatgaattctcctatgtctttcaaggtgtgatctgcgactgaaaactttgtcacattcttcacatttgtaaggtttctctccagcatgaagtctatgatgacgtgcaaggttttctcttcgactaaaaaccttgccacattcattacatgtgtaaggtttctctccagtgtgaagtgtatgatggtattgaagggatgacttccgactgaaactcctgccacatttattacacttgtatggtttctctccagtatgaactctctgatgttctgcaaggtatgaatcactccggaaaaccttgtcacaaaccttacatttgtatgatccctctccagtatgaatcttcctatgtctttcaaggtgtgatctgcgaatgtaaacattgtcacattcttcacatttgtaaggtttctctccagtgtgaagtatatgatggcattgaagggatgatttctgactgaaggtcttgccacactcattacacttgtaaggtttctctccagtatgaattgccttatgaattacaagggctgaatttcgaccaaaagtcttgccacactcattacacttgtaaggtttctctccagtatgaagtctacgatggcatctaagggatgacttctcactgaaggtcttgccacactcattacacttgtaaggtttctctccagtatgaagtctacgatggcatacaagggatgacatctgagtgaaggtcttcccacactcattacacttgtaagttttctcaccagtgtgacatctatgatgatatacaatgtattgcttctgattaaagatcttgccacatacatcacatttatattctctctctcttgaatgggttatgtggtgtctccttaagagtgagctataattaaaggctttgccacactcattactttggcaaggtttttctctcatgcatatttcctgtatttgtgtgaatgaagaatggaggaaattcttcccatacttattagaaatatgagttttgagcctacaagaaattctttgggattctgaagctgaggaagcaccgatagacttgtccaattggttactaattttccctttagtctgaaacatgtggagttcaggcagatgcgaatgaaagcttaatccaagctgatctttaataggcttgtttccagcatgcctgtgatcacttcggtctgtactaccagtcaactttttgatttttgtcatgggtgcttcatggccatttctttcaacttcttgccactgaaactcaaagtgatgaatatctttcttcatttctgggaagcaaaaatctccaatgtgatgacttttatgtctttgcaacgtccctgtgtggatcacttctcctgtaatactgtgcctggttgatgagaactccatcatggattttaaagagctatctaaaaaatataaagaccaataggtttccaattaagtacagatggtaaataatagttgatattcagatgtgtaaaaattacacaaaaagcaatacttattttaaacttcccaaatgtgatcttcatagtttaagaacacactgtctctactgaacatacaaaaattagccagtcatggtggtgggtgcctgtaatcccagctactcaggaggctgaggcagcagaattgcttgaagccaggaggcagaggttgcagcatgcggagatcaccacattgcactccagcctgggcaacaagagcaaaattctgtgtagaaaaaaaaaagagttcagtcaagagcctcatatatatgaggcagtgagcctgaatgatgtcctccctaagaggaatttctacagcagtgactactgcttagagaagatgaccattcgtttatgtgatgaacactgtcacagtgctagtgagagatgcttctgtgatggttctcaaaaaccagaatgaaaggccaagcatggtggctcacgcctgtaatcccaacacttcgaggctgaggtgggcaaattgcttgaggccaggagttcaagaccaacttggccaacatggtgataccctatgtctaataaaaatatgaaaatctgccaggtatggaggcatgtgcctgtaattccagttaggttgagaggctgaagtacaagaattgcttgaactcaggatgcagaggttgcaataagatgagatcaagactctgcactccagtctgttcaacagagggagactctgtctgaaaacaaacaaacaaaaagaaaacaaaaccacaagcacagctggaaacacttgtcaatcagtgtcatgctttctatctcgtatcctgggccatgctgaccattctgctcagggcttccagggacatctcttcctagagcaggatgatgttcaattgtattagtcaaagtgttcgtgaattttctgtttttatgtaaaaccactccaaagaagagtctctaagaagctgtccatgacagataggagggtcatcaccgcagaaaacaatgacatgtacatcaaaagcatgtatggggcaaaatcacaaaagagaatataaaaccagaaagagccaagatagacaagtgcagattcctcatgtctggagggacattttcctcacccacaaactccaggttcctgtagttctccaacatcacagccctgtataaagccctctgtgcagggttcaggcatttccactcctccaaagagaactctatagccacatccctgaaagtcaagcgtccctaaaataaaaaacacgtttcaacaaaacattatggaggagtgagttattgccctcacgtgaaatgagaaaacagaaaataagtattgatttgatccaagactgtgttctgacaaatttatgttaaggtatttttgaacaatttttcagtatagttgcattttattgtactttttcatgatagcttttaaaatcccctaagtcactgtggaagtctcagttttatggacaatataaggccaggaatggtggctcatgcctaaaatcccagcactttgtgagaccaaggcaggtggatctcctgagctcaggagttcgagcccaggacaatatggtgtaaccccgtctctactaaaaatacaaaaaaaaaaccaggtgtggtggcacacgcctctagtcccagctacctgggaggctgatgcacgagaataacttgagaacaagagacgaatgttgcagtgagccaagatcgtgccattgcactccagcttgggctgcagagtaggactccatctcaaaaaaaaaaagaaaaaaaatatatatatacacacatacacatatgttttatatatataatatatacttatatatattatatataaatatataatatatattttaatatttaattatatataatatatatttataatatataatatataatacaatattatatataatatgtatttataaaatataatatataatacaatattatatataatatgtatttataaaatatatatgatacaatattatatataatatatattacaatattgtatcatatattatatataatattgtataataaatatattattaaataaagatattaaatatatataatatatattttatatatatatataaaataagtccagacatggtggctcacacctgtaatcccatcactttgggagaccaaggtgggtggatcacttaaggtcaggagttagagaccaacctctccaacatggcaaaactccgtatctactaaaaataaaaaaattggctgagcatggtagggaggtgcctgtaatcccaactattcaggaagctgaaacaggaaaatcgcctgaactctggaagcaggggttgcagtaagccaaggtcacaccattgcaatcctgcctgagcaacagactgagactctttctcaaaaaaaaaaaaaaaaaggtatatatatattgcaaataatgtattttctacataaaccgtgggattggctgcacacagtaggtacacctgtaatcccagcactttgggaggctcaggcaggtggataacctaaagtcaggagtttgacaccagcctgaagaacatggacaaattctgtctctactaaaaatacaaagttagctgggaatggtggcgcatgcctatattcccagctactgaacctgggaggtggaagttgcagtgagccgatatcgtgccactgcactccagcctgggccacaagaatgaaactccgtctcaaaaaaaacaaacaaacaacaacaacaaaaaagaaatgaaacaaaactgtcaaggactcatgagtcttcattcagagaaagctccaaggaggatttaaaagagtgagctatcttgttttctaccttggaaacatgaaaattttcagaacttgcaggataaaatatcataacaaacattcatcagaccgggagcagggctcacacctgaaatcccagcacttagggaggccgacgtggaaggatcacttgaggccaaaagttcgagaccagcctggccaacatggtgaaaccccatctgtactaataacacaacaattagccaggagtgtagcacgcatctgtaaatgcagctactcagttggctgaagcgtaagactcatttgaacctgagagccagaggttgcaatgtgccactacactccaggcggggaggccctgtctcaaaaaacatgcaaaaaaaaaaaaaaaaaaccccattcatcaaataattttttctaaaatctcataacggtatatgaatacatttctaaaggattgcgccgacttgccacagaactctcaacagcgattccccactgagacatgggaatgggtggaaggctggacaggaaaggggatgcataagtgcacttttctttggacttttactacacaacacatatatacatcatgtgatgtttaaaataaaagaattacttaataataatgggtagaaaaagaatggctccatcctctctaacgacgtaagttgtgctcttatgtcagagcaaacttataatcatttttacctaaaatgtttgcttcatcagagtccctgtaaaaaaaacaaaacaaaacaaaaaacaaaaaaaaagtctctgtggggtcaaagtgctgagaatgatttaaagaatcccctgcagttagatatttatattgatttcataatttgaagtcaatgatggaataaagctaactctattactggtatctatatccgctttccattctattctaagacattgaaagtgcagagtcctgctgggctgtctcacacctgtaatcccagcaatttgggaagctcaggtgggagggccacttaagcccaggagttcgaggctgctgtaaactagaattgtgccattgcactccagactgggccccagagtgacaccgtgtctcttaaaacaaaagtttggcgtcagagacatattgactcactagtgtagcttcaaatgcattacaaaatcagacacaaaatatctcccctagtttgtctcctcttccagaatttaccagattaaccagtgaacattaatgtatgactttcatatacagtttctctgatctggtccacaaagagctaaacatgcatccagatgtggcccctgaacaatccctgctgcccaacatcactgacaccatggggcccacaccccatctccatccatgtctggtgtgagcccttcccaggaccatgcccagtggagcctcttcccaagctcatgtcactaggttataggagatggaatttaagtgaagatgagagggactgagaaaagacacgggtgagtgcgagcaaacgtgtgatgtagaatgcttcacactcagagaagattggctactacaatacctggcacttcagaaaggaaagagacagaagaatccaccaaggaatatcacttacctgaggaagagccatccctggctccttttctttgctcttcttggtggcttcctcacgtaacatgagtctttggaaatcctgtatgttaaaaaagcaagagatttaatatttagaaaccattgactcctttcctgtgacaaaacacacacacaggggaaacctcacccgagagaaagatggtcctttgctacccactgcaccagagaccatgcagagataagaaagttccacaggaagacctacaaatgtaattttgacccgttttcagatcttgctcccctcctggaaaagtccacacacacgctgcagcaggacacagatcttcagggcacagatctagccctaaccaaactccatgcagagcacagccccctcacctccctgtggatcacagactgatctcagctctcaacatggaggaaacttccttgatgtttaatgctggacacagataagaatcaccagtgccattgtaagtattattgagtgtgggtcccatcctattataatagcaatctgataaaacagcatgcctgtaatcccagcattttgggaggccgatgcagctggatcccttcagctctggggttggacaccagcctgagcaacatggcgaaagcccatctctacgaagaacacaaaaattagtgtggtgtggtggcacgcagctgtggtcccagctactctggaggctgaggtaggaagcagaccaccacttctcctgctgccttcctccctcccccttgcctagtttataagacaggaggaaaggaagaaagcaaaaagttagaaagaaacagaagtaagataaatagccagacgaccttggtgctaccacctggccccggtggttaaaaataataataataccaacccctgacctaaactacttatgttatctgtaaattctagacattgtatgaagaagcattgcaaaagtttctgttctgttagctgatgcacgtagtgtcaagtcacattccccacacttgcttgatctatcatgaccctttcacgtggatgccttagagctgtaagcccttaaaagggccaggaatttctttttcagggagctcagttcttgagacacgagtcctctgatgcgctgggccgaataaagccacttccttctttaatccgttgtctgagaggtactgtctgcggctcgtcatgctacatttcttggttccctgacttggaagcgaggtaattaacagaaggtcgaggcaaccccttaggtgacttaggcctgccctttggagcatccctgctgggtactccagccagcttgggcgacatggattctgagagtgctaccaggtaggcatgtgccccagaaagatacttagcctggccatccgaacttgcagtgtaaccagtgtgcttactgtaaagaaataggatattagaaggacaagtgccctcagctaaaaggaaaacaaggtggctcagagcaggaggccccagaaggagccctgttcaatatagcagaagagttactgaactgaggaggaccaggctcaactgcccccaaggagcccatggtcaagatgacagttaggggcaaagacattgattttcgtattgataccagtgctgaacattcagtagtaaccgccccggttgcccccctttccaaaaagactattgttataatcggagccatgggagttttatcaaagcaagctttctgttgccccagacttgtactgtaggaagacataaagtgattcaccagttcttgtacatgcctgacttgaaaggacttgaaaggacttgcttagcgagctgagagccaccgtctcttctacagagcacagctctttacagctaaggttacccagaacgggagtcattatggcccttacagtcccccaggaagaggaatggagacttcttttaactgagccaggccaagagataagaccaactctggctaagcggtggccaagggtgtagacagaagacaaccctccagggatggcagttaaccaagccctggtacttatagaagttaagcgtagggcccagccagtcaggcaaaaacagtacctggtccccagagaagatcttgaaagtatccaggtccatctcaagagcctgagagcctttagaattacagtcccttgtcagtctccctggaacactcccctcctgcctgttcccacgccagggaccaatgactacaggccggtacaggacttgcacttagtcaatcaagctacagtgactttacatccaacagtacctaacccgtacacgttaaggttgctgccagctgaggacagctggttctctggcttagacctgaaagacactttctttagcattagactagcccctcagagccagaagctgtttgcctttcagtaggaagatctgggatcaggtgtcactgctcagtactcttggacccggcttctgcaagggttcaagaactcccccaccatcttcagggaagcactggctcgggacctccagaagtttcccaccagagacctaggctgcgcattgctccagtacgttgatgaccttctgttaggacaccccatggcagttgagtgtgccaagggaaaggatgccctactctggcccttggaggactataggtataagttgtccaagaagaaagcccagatctgctgacagcaggtacattacctaggatttactatccaacagggggagcgcagcctgggatcagaaggaaagcaggctttttgcaacctactgaagcctaagaccagaaagcaggtgaaagaattcttaggtgctgtgaggttctgcagaccgtggatcccaaactttgtagtactggccaagcctctgtacggagtcacaaaggggcaggaccaggaaccttttgaacggagatcccaacaacagcaagcctttcatgagttaaaagaaaatcttatgtcagccccagccctggggttacctgacctgacaaagccttttacgctgtatgtttctgagagagaaaatacggcagttagggttttgatccaaactgtggggccctggccgaggccagtggcctgcctctctaagaaactaaatggggattctaaaggttagccctcatgtttgagggccttggcagcaactgccctgctggcagaagaagcagataaactaactcttaggcaaaacctgaacataaaggccccccatgctgtggtgactttaatgaataccaaaagacatcattggctaatgaatgctagactaaacaagtaccaaagcttgctctgtgaaaatccccacataaccattgaagtttgtaacaccctgaaccccgccaccttactcttggtatcagacagccctgttgagcataactgtgtagaggtgttggactcagtttactttagcaggcttgacctttgagaccagccttgggcatcagtagactgggagctataagtggacaggagcagcttcaacagcccacaaggagagagatgtgcaggatatgcggtagtaaccctggacactgccattgatgccagatcgttgtcccagggcacttcagcccagaaagccgagctcattgctttaattcaggccttagaactcagtgaaggtaagactgaaaatatttacactgactctcggtatgcctttttaacccttcaagtgcataaagcattatataaagaaaagggcctgttgaactctggagaaaaagacataaaatatcagcaagaaatcttgcaattattagaagcagcatagaaaccccacaatgtggcagtcatgcactgcagaggacaccagcgagcttccacctcggttgccttagggaactccagagctgactcagaagctcgaaaagcaacatccacaccctactgggcatcagtcacagcccccttgctccctcaagcacctgaccttgtacctacttattctaaagaagaaaaagactttctccaggcagagggaagacaggtgatggaagaaggaaggatccggtcaccaaataggacagtacctgtgccacagctgctaggagccacagttgtactggaggtgcatgaaaccacccatctaggtcaggagtcacttgaacagttgttaggctggtacttctacagctcacaattgtcagccctcgccaaaaccgtggcacagcggtgtgttacctgccgacagcacaatgcgaggcagggttcagccattctgcccggcatacaagcttatgaagcagccccctttgaagatctccaggtggacttcacagaaatgccaaagtgtagaagtaacaagtatttactagttctcgtgtgtacctactctaggtaggtggaggcttatcccacacgaactgagaaagctcatgtgcttcttcgagatcttattcctagatttggacggcccttacgaatcagctcggataacgggctggagtttgtggctgacttagtacagacgacagcaaaggtattaaagatcacgtggaaactgcatgctgccttctgacctcagagttctggaaaggtggagtgaatgaatcggattatcaaaaatagcttaaggccttaggaaaaattacacaaatgatttcagcccaggtaaatgagagatgccccattagcttattctccccagttcactctttctccccgggtgattgagtgtggatcaaggactggaacgtagcccctgtgtgcccccactggaaagtaccccagaccgtcatcctgaccactcccaccgctgtgaaggtagaaggaatcccggcctggatccaccacagccatataaaacctgcagcgcctgaaacctgggaggcaaggccaagcccagataacccctgcaaagtgaccctgaagaagacgacaagccctgctccagtcacacccggaagctgactggtcctacgcacagtggaagcatgaggaagctcatcgtgggactcattcttcttaaattttagacttgtacagtaaaggcttcaactgaccttcctcaaactaaggactgttcccagtgtattcatcaggtcactgagataggacagcaaattaaaacaatctttctgttctatagttattatgaatgtacaggcacgttaaaaggatcttatttgtataattccactcaatacaaggtacgtagcccaggaaatgacaaacctactatgggttataacccatctaagcctcctgcaaccaccgtttttcaaataagattaagaactggtcctttcctaggtgacacaagtaaaataataactagaacagaagaaaaaagaatccccaaacaagaaactttaaatttgatgcttgtgcagccattaatagtaacaagctcagattaagatgtggctctcttaactaagaaaggagctgcacagtagaaaataaatgtttgtcatgaggcagaggtctgtgaaaatttgcctgttgcccatgtgttatttaggctacttagaaaaatgacaaaaaagacccggttcactttcaaaaaaaagaagccaacccctcctgtgctagcagtcactgtaacccactagaactaataatcactaattccctagacccccgttagagaaaaagagaaggtgtaatcctgacggtcaataggacaagggtaaccccccaagttgccattttagtccgaggggaggtccccaggccctttcccaaaccagtgtttcaagccttttataatgagctaaatctgccagcaccagagcttccaaaaaagacaaggaacttgtttctccagttaacggaaaatgtagctcattccctcaatgttgcttcttgttatgtacgcggaggaactactgttggagaccgatggcctcaggaagcccgagagttggtgcccactgatccagttcctcacacaattccagctcagaaggcccaaactagcaacttctaggtcctaaaaacctcagttattagacaatactatgtagctaaggaaagaaaaaacttcagcaaccccgtaagaaagctcaattgtctaggacagaagttgtatacaacagcacaacaaggacagtcacttggtgaggcttaaaccacactgaaaagaactcattacgtaaattttctaaattacagactgcctaggctcatccagaatttcattgagactggacggcccccgctggactatactagtccaggcacagagactatactatactatactagtccaggcacaggctatactagtctgtaggcacagagacccatctccaacaacaaagaagaaaagtgaaaatctgggtcctggctctgggaatctaaggccaattaatgtgaactttgcaaaactagaccaaaaggaataaccccatctccccacccgtagtaacaaaggatcaaagggtactctccctgtagccctcccacttccaccacgtctcagatggaaagggaaagagcccaggagtggccacaaagcaccggccaccctggggctgcggggctgcaacgctgcgctccaggggccgactagagcgaggctgggaagcgctcttgcccagggcaagaatccagctccgggtgaggacttgaaacagcgcgaggcgggaggacgcgtcagaaagggttttgctaaggaaagtttcgcgacaggaggtgtctgcacggccccactgcagaaagaccggggacgggaccagcctcagggcaactttaaactcaaaaggaagcgactcacggactctcacccggacgtttcaatttgctctgggttgagaaaagaggggccggaacctgcaggtctgtggggaccccacgtcccctatatagcagcaccagacaactaggaaacgcacacgccgccgtgcaactttcagtccacgccatccgcttccgggtctgtgccaatcggcgcaggacagaagcgggacctgggccagatccccgagaggtgggcggggcctgggcgaggccggggcggggtgcaaaggacaaggggcccggcgcggaagagaagagtcttgggctgggaggagtccgcgggggcgggaaaggggcggggcctgagcttttctccatctcgctctccgcgcctctgttttcaaggttttagaggtgaaacccgccagtgaggctggagcagctcagcagtcagggaaatagtacctccctgagaagtcgccgtgtggcggtaattggatccgggaaagttccttgctattgaaatttattttagcaatttaattccaaagcctggaagttgtctacggcaggaatgcaaactagaatgcgaaatgcaaagccttgcctgagcgaaaggtacaatttcatgctgacggtccacagaacagaatagaaatcctctccctttcaattctccattcactggagtgggagagtccacactgtgctcagctcctgagacttccctagggccaccgtctggggtgcggagcagaggagtgtgcttaaacacagcagggatgcgggcggggtggcaggagtctggggtccccgctactcaggaagcaggggcgagaggatcgctgagcctggagttccaggccagcctgggcgacaaagtaagaccctctatcccagagctccctcctccgtctcaataaacaaaaaagtgatttaaaaaaagcactgacattgtaacagtgcatataagttgcccagttgtttcttacgtttattatttcatgctgcacttaaaatgagttatttttgtcgtggaaaagaatcaaactgtaaaatatcttaagagatttattctaagctaaatatgaatgaccctcaggaggtcctgagaacatgtgtccaaggtgatggggaacagcttgttcttagacattttagggaggcattagacatcaatcaaatacatttaagaaatacgctgctttggttcagaaaggaggggcaactcaaagcggggacttctgggctacaggtaaattgaaacattttctgattgacaattggttgagtttgtctaaatacctgggatcaacggagaggaaatgttcacgttaaggtaaaagattgtggagaccaatgttgttttcaagtcttctattggctgcccttagagataatagatgataagtgttttctattcagacctttaaacagtgcgagattcttacttaatctcttcaggattggtagggcctagaagaaaaagatctagctatgttaacagagattctttacaaatgcacatgtacccctcacaaagaacagctttgcaggaccatttcaaaatatggcacagaaacatgttttggggtaaaatattttgactttcttctttgtcacgttattccagagtcagactggaaagtaagacaggatatataggactaaataaaacccatctgatgagtatttatggtttgtagggcatgactccccagaccctttagataggaatttgggcaagagaaaaaaattagaccttggtcctcattctcaaattctttttttaaaaaataattcctaagtgtattgtaatatcaaattcactttacgtgccttctgaaaataagtagaaaatgtactttttatcttcaagttgtaatttttttttccctagaaacaggacctagttctgacacccaggatggaatgcagtggtgggaacactgcccactgcaacctcaacctctggggctcaagcaatcctcccgtctcacctcccaactagctggggccacaggccctcaccaccaggcctggctaattttttaatattttgtagagtcgggggtccactatgatgcttaggctggccttgaactcctgtactcaaacaatcctcccaccttagcttcccaaagtgttgggattaaaggcgagctaccacacccatccaattgtaatctattttgggtgttttctttgttgttctctcctaagtgttctatcaggtgtgaacaacaaaggctgtaaaataggcagtcttcaaacattgggatttattttcatatagagaataattatgagatattactaaggatacattgcagtcaggttattctgttttacgtgggccctgaagaaaatataactaaattacaaaattggctgggtgtgatggctcacacctgtaatcccagcactttggcaggcctaggcgaatggatcaccctgaggtcaggagtttgagatcagcctggccaacacagcgaaaccccatctgtactaaaaatacaaaaattagctgggcatggtggcatgcgcctgtaatctcagctactcaagaggttgaggcaggagaattgcttgagcccaggcagcagaggttgcagtgagctgacatctcaccattgcactccagcctgggcaacagagtgagactgcatctcaaaaaaagaaaaaaaaaattataaacttttacatcaccgcatttctgcatgcaataattttatggcaatatctgtaagttaacatgtactatgaactatatttttcactcacatccctagttatcgaaggtttcatttatcaaatactagtaattagctaaaacataattatgtttaggaagaaattagcatatctaaaatattagcaagtttaaaaaagcataatgtggccagggatggtggctcgtgcatgtaattccagcatgatgggagaccgaagcagaaagatagctagtggccaaaagttggagaccagcccaggcacatggtgaaacctcatctttatattttaaatatttatgtatctatgtattcatttattcatctttgagatggagtttcattctcattgcttaggctggagtgaaatggtgtggtctcggctcactacaacctctgtctcctgggttcacgtgactctcctgcctcagcctcccgagtagcaggtattacaggcatatgccaccatgcctgactaattttctatttttactagagacggggtacctccatgttagtcaggctggtctcgaactcccgacctcaggcgatccacccaccgcagcctcccaaagtgctgggattagaggcctgagccaccatacccagcctctatgtagctttgtaaaaaatccttgtagctgtctcttttaggaataaaatgggaggcaggtttgtctgacacagttcccagcctgacttttctctttggcttagtaatttttaagcttctttcacaaccttctgacagacataatgctttgacacactgatattggtttatatagattttccaaaacagtaaagtccaagggtctatcctgaactgggttagcggaggcgagaagattcccagaagactcctgatctcaagcaatcctcccacctcagcctccgaatgtgtgaggaccacaagtgtgatccactgaacccagtggagtctccatctcaaaaaaaaccaaaaagcaatacgggaattaaggtactctatggaattacatcatttgacttttttttgaaatgaaaagcctcacatatttattactgaacccagccaaccaacatgttcataacagattcagagagaaaaaatatattcccaataaaacatgtccaactctccagataatggtgacattttctgcttgatatggtaacgtgattgtaatgctcagacagcataaaaatgtgtgccatctcatgtacaattccttatagacacggattggttcttctccaatgtctccttttaaagttgtacctgattttattaccagttttcatctgaatccactggggaatggaacaattttgctttttttcttggccaggaattgcttaatcctgatagtcttatgagaagatctggtgagaagcagagtcaagtacacaccatgatggtggagaaaggaagagaaggggcttgacatctttttttttttttttttttttttttttttgagagaaagtttcactcttgttgcccaggctggagtgcaatggcactatcggttcactgcaacttccacctcctgggttcaagcgattctcccacctcagcctcccaaggagctgggattacaggtgtctgcgaccatacctagctaatttttgtatttttaatagagatggcatttcaccatgttaaccagcctgttctcaacctcctgactattgtttctgctgttagctgtcagtcctcttcatcacggcacaaacaagattattgtttttctctgaaactgatgtggatggtctgcctgctgctccacgtgtaaccttcaacattgtcttctcccaactcaaaattagttatccatttacaaactgttgatttcttttgggcatcgtccccataaccttttcataaagcatcaatgatatcataattcatctacccaaactttaccataagtattctttttttgagacatgctggagtgcagtggcaagatcacagctcactgcagcctcgacctcccaggctcatgccatcctcatgctacagactccacagtagctggccctgcagtcaggtgccaccctgcccagtgaatttctgtattttttgtatagaaggggttttcaccatgttgcccaggctggtcctgaatgcctgggctcacgtgacccacctgtcttggcctctgaaattactggaattacagacctgagacactgcaactgttctcatcataaattttatgtttcttcttgtttcaattttagcagaatttgtattcctttgatacagtctcttttcaaactcatgtcttatccttctcagtgcctcaaactagagcctgttcagacatgttataacagatttgtatcagtttattttggtgcaaaaactgtgaaattcatgcacaatttttccataatatgtatttttccatgagcttcttgaagaccacttgtactagaaaactgtattcaagaggatatataaaaggattgtagatatgcaagtgccatttacttctggcatgcaaggatggttcaacatattcaagcaaatcaatgtgatataccacttgaacagaatgaaagatgaaaaccacatcatctcaacagatggagaaaaatcatttcacaaaattcagcatctgatcatcatagaaatcttaaacaaaatagatggagaaggaaatttacctcaccaatagaaagaccattgatgaaatgaccaatgtggagataaccaagcagggaaaatagaatccttttcccgtaggatctcacatgatgcaagaacgttctcactttttctattcaataaatactggaagtcctagccagagcaatgaactagcaaaagaaatgaaatgcctcaaaatcagaaaaagtaaaattatattttttgtagatgacatgatcttctgtgtagaaaatcacaaagagtcaaccaaaatactactgtgactaataaacacatcagtagatttgcacaatacaatatcagcaccaaaaattcgttgaattttcatacattaacaataaacaattttaaatgaaaatttaaaaacacttccatttgctagagaacttaaagtaagaaataggaataaatggaaagaagtgagaaattcatacattgaaatctacaaacattgatcaaaatgattaaaaacatatataaagatataacccatattgatgttttggaaaaattaatactgttaaatgattacataacccaatgtgattttgattcaacacaatacccataaaaatctctatcagtttttgttgaagaaacaaaaaacagactgggaaaggtgctcacctctgttggccaggctgctctcaaactcctgatctcaagtgatctacctgtcttggcctcccaaagtgctgggattacaggtgtgagccaccgcacctggcctaatcctcttaacataaacactttaatctcaacaaatacttgaactcaatgttaagtcaactcaaactgaactcaatgctgatttgaatctaacatcaattgtgcttgatggtttgctatactcattgcatttgaaattattacctcaaaaatgaatttcctgatgtcctgcaaggagtgacctcagactaaagatcttgccacacatatgacttttgtaagatctctgtctagtatggattctctgatgtgtaatgaggcatgaacctgaaataaaggctttgacacaatcatcacccttgtgaggtttctttcttgtatgaattcacctgtgttttgcataagatgaagcttgactgaagaccttgccacaatcatcacatttgtaaggtttctctccagtatgagttcgctgataaactgcaaggtatgaacgaagtctgaaaaatttgccacatttataacacttgtaagttctcacttcattatgcattctccaataatttgcaatggttgtagcattactgaggactttgtgacaatcattacattagtaaagtttccctatgacatggattgcttgatggtgaataagtgttgactgaccactgaaggctctgtcacactcatcacacttgcacggtttctctccagtgtgaattctagtatgttgtgccaggtgtgaatcacacccgaatgccttgtcacaaaccttacatttctatggtttctctccagtatgaactctcctatgtatttcaaggcgtgaattgaaattgaaaactttgtcacattcttcacatttgtaaggtttttctccgatatgaactctatgatgatgttcaaggtttgattttcaattaaaaaccttgccacattcattacacttgtaaggtttctctccagtatgaagtctatgatgacatgcaaggtttgatttgtgattaaaaaccttgccacattcattacacttgtaacatttctctccagtatgaatgaccttatgcattacaagagatgaattttgaacaaaggtcttgccacactcattacacttgtaaggtttctctccagtgtgaattacaatatgttgtgccaggtgtgaatcacgtctgaaagccttgtcacaaaccttacatttgtacggtttctctccagtatgaattctcctatgtctttcaaggtgtgattagcgactaaaaactttgtcacattcttcacatttgtaaggtttctctccagtatgaagtctatgatgacttgcaagatatgctttttgattaaaaaccttgccacattcattacacttgtgaggtttctctccagtatgaattgccttgtgaattacaagggatgacttgtaactgaaggtcttgccacactgattacacttgtaaggtttctcaccagtgtgacatctatgatggtatgcaaggtatcgcttctgattaaagaccttgccacatatatcacatttatattttttctctcctaaatggattatctgacatttttttaacagtgagctacaattaaaggctttgccactctcattacattggaaagatttttctctcatgtgtgcttcctggaggaaattattcccatacttattagaaatatgggttttaggaatacaagaaattctttgggatgctgaaactgaggaagcatcattgacagacttctcatcttgactatcaattttccctttgctctgcaatatatgcagttcaggcagatgtgaatgaaagcttgatccaagctgatctttaataggtttgtttccagcatgcctttgatcatatcagtctgtattacctgtcaacttttttatctctgtcatgagtgcttcatggccatttctttcatcttcttgccactgaaactcaaagtcctgaaaatctttctcaatttcctggaaggaaaaatctccagtgtgatgacttgcttgtctttgcaatgtccctgtgtggaacacttctgtattgccttgccttcttgatgagaacttccttgtcatgcatttggaagagatagctacaaaatataaacaacaataggtttccaattaagtgcagatggtaaataatactgaaatatgtaactaggacacaaaaaacaatatttattttgaaattcccaaacatgattttcaaagtttaagaacacaaaaggagtaaggttctttaataaataaagggcgattacaagtcctttaaatcatttctacagaagcctattcccaatatcatgacgaaacactgacagggcacaaacatgtgtaagcctaaagtaaggagtgtttttccactgtgaccctaaaatgtatcacagtttgcaaaaagcatattactgtcacatcaaagaaggaaaaaatatatattcttcatatttatagcatagagtatacaaataaatgctaaaggaccggataacgtactatattggtaaataatccacaacaagctcttgtaaggataatcaaaatcaatggaaattctgtattgtcaaacaatcacagcactgagaagataagaaaagaatacaaaaattagccaggcatggcggcccatgcctgtaatcccactacatgagaggctgagacacaagaatcaccaagaggcaaaggctgcagtgagtcaatatcgcaccactgcactccagcctggatgacaaagtgagactccatctcaaaaaaaaaaaaaaaagcagggcatggtggctcacacctgtaactccagtacttgtttgggaggcagaggcaggtggattacctcaatacaaaaagtagccggtagccaggcatggtggtgggcacctgtaatcccagatacctgagaggctgaggcagaagaattgcttgaatccgagaggcaaagattgtggtaagctgaaatcgtgccactgcactccaccctgggcgacagagtgatactccatcccccaaaaaagaaaatgtgaataccatatttttctgaataactgtgaaaaatttcctatatccatgtggaacaggcactttgtgactttttaaaaaaatgtttattatttttatatttttgagatggagtcttgctctgtcacccaggctggagtgcaatggcacgatcttggctcactgcaacctttacctcctgggttccagtgagtgtcttgcctcagcctcctgaataccttggattacaggcaagcaccagcatgcccggctaatttttgtatttttagtagagatgggatttcaccatgttggccatttgggattacgggcataagccactgcacccagtggcactttgtgacattaatgagtgcagtgtgtcagttatattgcatgccacatactgaatactcacatgtaaagtcataaaattcaattaacaaaatattgtaaccaacgataaaacaagaaaataatatgtacatttatacagcctgcagaattgtaaacaatttccacttaagaaaaaagccaaaacttctacttaccaccagcacacaatataagaactgaattacatgttaagatcactaccttctgatatatgaggtcaagaaaatacacagcattgccaggcgcagtggctcatgcctgtaatcccagcactttgggaggccgatgcgggcagatcacgaggtcaggagatcgagacctggttaacacggtgaaaccccgtctctactaaaaatacaaaacgttagccgggcgtggtggcacatgcctgtagtcccagctactcaggaggctgaggcaagagaatggcgtggacccgggaggtggagcttgcagtgagcagagatcgcgccactgcactccagcctgggtgacagagtgagactgtctctcacaaaaaaaaaaaaagaaaaaaaaaagtacacagcatttaaacgaataagaattgactaattgccaggcgtggtggtgcatgcctgtaatcccagcactttgggaggctgaggcaggcagatcacgaggtcaggagttcgagaccagcctggccaacgtgctgaaaccccatctctactaaaaatacaaaaaaattagctgggcatggcggaaggtgcctgtaatcccagctacttgggaggctgaggcaggaatcgtttgaatccaggaggtggaggtgtcagtgagctgagatcatgccactgcactccagcctgggcaacaggatgagactcaaactactcaactacttctcaaataagctttggtagatgtggtattctctaacaggatgttcctgcagatgcagacttggagagaatttagtcatgggtgttgactacctgtgaatactaaaagtgcatttataaagagacattaaagagctcattgcctgttcctctttcccccatgtcaggacatggcaggaagatggctgggctaaaccatgaagaatgctctcagcaggaaccaatttggctggcaccttgctcttggatttcccactttccaaattcatgagaaataaatttctgtgtctgaagcctcccagtttaagctatttctttttttgtttgtttttgagacagtcatgctctatcagccaggctgcaatgtagtggcacaatgattctcctgcctcaagagattctcccgcctcagcctggagtatcactctgacgcccaagctggagtgcagtggcacagtctcagcccactgcaacctctgcctccggggttcaagtgattctcctatctcagcctcctgagtacttgggataacaggcacttgccactgtgcccagctatctgttgtatttttagtagagatggcatttcactatgttggccaggctggtctcaaactcctgacctcaagcgatccacccaccttggcctcccaaagtgctggggttagaagcattagacaccagggccgaccagtctaagctatttttgacaggacagtgaaatgcctgagacaggaaaaggagcatctcatcatcagcctcacagaagacttacaaatcttattaaacaaaggaagttaacagtctgtactgtaaaacttgcaatacttgaagccatctaataccactaacaagttttcaaaaccttaaggcaagcagggcatggtggctcgcgcctgtaatcccagcactttgggaggctgaggtgggaggatcacgaggtcaggaaattgagaccatcctgcctaacacggtgaaaccatgtctttactaaaaaaatacaaaaaattagccgggtgtggtgacacgcacctgtagtcccagctacttgggaggctgaggcaggagaatcccttaaaatcaggaggtggaggttgcagtgagccaagatcgcatcactacgctccaggctgggcgacagaccgagactccatcttgaaataaaaaaaagaaagaaagaaagaaagaaaaagaaatgaaagaaggctaaagagtaactccaacccacaaatatatataaagttctccagtgaaggtaaataaaaggacagataggccaagtgcagtggtgcagcttatagcttgcagtgaacgccaagaatgaagtactcagataattccagctgagtggggcggggagcaaaccttctgagagagtgctgccccagaatccgtcctccaagtatttattgaaagggcttgtttagaccggtcgcggtggctcacgcctgtaatcccagcactttgggaggccgaggcgggcggatcacgaggtcaggagatcgagaccatcctggataacacagtgagaccccgtctctactaaaaatacaaaaaaattagccgggcgtggtggcgggcgcctgaagtcacagctactcaggaggctgaggcaggagaatggtgtgaacccgggaggcagagcttgcagtgagccgagatcgcaccactgcactccagcctgggcgacagagcgagactccgtctcaaaaaaaaaaaaaaaaaaaaaagggcttgtttaaactacacttcagacaaacaaaaaacatacaccatggagctctttgcagtcgggtcgtgaggcactatggccttgtaaaagcactcagaccacattcacaggagactgtttcagcgtttcttatcacacattctactccttgtcctgatttcagggtcaaggagtgacagtctcatacacaaacaacatacacacagtgcctcagtaattttccattcctcaatctcaaatgccttgtacataagcttatgttgccgcgcatccatcaaagttggttcacacccgtaatctcagcactttggcaggccaaggcaggtggatcacctgagtttgggagttcgagaccagcttgaccaacaaggagaaaccttgtttctactaaaaatacaaaattagccgggcatgatggtgcatgcctgtaatcccagctactcggggggctgtggcaaaagaatcacttgaaactgggaggcggaggttgcagtgagctgagattgtgtcattgcacttcagcctgggcgacaggagcaaaactttgtctcagaaataaataaataaataaataaataaataagtaagtaaatagacagatacagaaacctgtataagtgtatcttttctttataactcaacttttttttccaattatttagcagaaaaaagcacaaaaaaaacactgtacatatatgttaatgaaaatgcaacatatacagaaataattctgacataaataacaaagagttctagtggagaaagtagtctttgcaggttatggaaatttttgtttgtttctttctttgtttttttgagacggagtcttgctctgtcgcccaggctggagtgtaatggtgccgtttcggctcctgcaatctttgcctcttgaattcaaagatttcagcctcttgagtagctgggattacaggtgcccactgcacttcgaattttcagtagagacagagttttgccatgttagccaggctggtgttgaactcctgacttcaggtgatttgcccaccttggcctcccaatgtgctgagattacaggggtgagccactgcacctggccaggtaatggaaatttcaagttttgttattatgctataacttcaagatgtttaacacaccttcaacaataacctccccctaaatatctatacaacacacttcggttcttcatattgaaaggaatggacactaacgtggttgttatgttcacattggaatcatgcttaagccacttatatgtttactaaaaactaaaagacaaaactatttaaaataataataatggctgggcacggtggctcacgcctgtaatgccagtactttgggaaaccgagacaggtggatcacttgagatcaggagttcgagaacatcctggctaatgtgatgaaaccccgtctctactaaaaacacaaaaattagctgggcgtggtggtgagcgcctgtagtcacagctactcagaagctgggacacaagaatcgtttgagcccgggaggtggaggctacggttagaaagatcgcaccactgcactgtagcccgagtgacagagtgagacttcaccacaaaaaaaagtaaataagaagagagtcaaagcatgtctacagaaaaaaagtaattaaacacaaaaagtaggaaatgagaaatgaagaacaacaataaaaacctacaagaaatacagataatatgtaacaaaaacgcaacggtaaggtcttctccatcagtaattattaaaatgtaaatatttaactctgcattcaggaggcaaagactggctgaatcaacaggaaccaactacatgttgtccacagaagactcatattagccctaaggacacacatacgctaaaatttaaaaaataaaaaccaataattaggtatgggggttggggcctataatcccagctactcaggaggccaaagaggacctcttgagcccaggagatcaagaccaacttcaacaacacagcataaaactgaaaaataacctggagaaagcagggaaggatagtctgctggtttaccattttgatccctggtacagacagctcctctatttgtgccccctggcttatagcacaggctccatagctactgagtcagtgaatgaatgagaatgactgagtgatactagtatgtcttctctggggtctcatgtgtgccagggtcctatttgaccttggaatggtcttcatcgtgatgagggagctgagcaggagcagctgagcgggacagcccagagtccctcatgcagaccactctgcttgcccaaccggtaagaaggacaagtgtatgttcactcagaaacacatctggctgatccaacgggtcactgcctgaccctgagcaaacttacattggcaattaaagaccctaaactccgcagaaagaggagaggcttccttgctgcccggactctcaatgaagaaaaattcctggggtctaagacttctgacttggcaatgacattggcttaaatattcccagactcaaatccttgggtcttagttgggtcttgggatggtgcaaaccgatagaattgcaggcaatgagtgtcagaacagaacagcggacaggaaggtggaagacttgagggaggggatcaaggacaggcaaagaaaccactcccctccctcagacgcccacctggggaagcatcaactttgtcattctagagaagacaacgggaaaggaaggactgtgcatagggtaggtgacggtgtgtgctgggtggagagaaaaacccctttttctaaatgtgactccaatagctcagcccatttattctactaactgctgagcacagaggcatcctgtgaggataaatacggcttttccttcctccaattcctgaatctccaggccatgactagtgctgtaaccctcaaaatcccttcccaggacccagcgttccctctgtgggaaaaatatctgtgctccacatttagattatagcttatttatttattaacttatttatttatgttgagatggagtctcactaagttgccaggctggaatacagtggcacgatctcagctcactgcaacctctgcctcctaagttcaagcgattctcctgcctcagcctcttgagtagctgcggctacaggcgtgtgctaccaagcccagctagtttttgcattttttcaatacagacagggtttcaccatgttggtcagaatggtcttgatctcttgaccttgtgatctgcccgccttggcctcccaaagtgctgggaatacaggcataaactaccattcccggccatcatttttcatcttttatttttatttttatttttatttgagacagagtcttgcactgttgccccggatggggtgcaatgatgcttccatccagaagacagaagaagaaacctctgtcttctgggttcatgtgattctcctgcctcagcctcctgagtagctgggattacaggtgcataccaccacactcagctaattttttttttttttgtatttttagtagagacagggtttcactatgttgaccaggctggtgtcaaagtcttgacttcatcatccacctgccttagcctcccaaagtgctgggattacaggcgtgagccaccacacccagccccacatttacattataacattttgatcctcggctccccagctgccttctgactgtgtgtgtgggtgtgtgtgtgtgactgtgtgtgtgtgtgagtgtgtgactatgtgtgtgagtgtgtgactgtgtgtgtgtgtgcacgtgcgcacacactcatgtgttgtgacaggcaaggaaaagccagtagagagtcatcgccattggcctggcaggaggaggtggccctcaggctgcagttcacggtgctgtttgcactctgatccttggaagaatctttcctgaagtcacggagcctccagctgctccagaacagaactagttgtgtaggagtgtgtccttcatgcccctcaggtccctgaccttctccccacccttcctgaagggaatccaggaccctcactctgagtgcatcacctgctggtggcaaagcccctgcccatcatggccaaactgggccctggtgatgtgcagagcgtggagacccgggagctggagtgaggcagttgacacagatgacaaaaatgcagatgcctcggcactgcctgaggacacagggtctggtctgtagggcttttctggctttagtgaggtcttctccttttaatttgactgaaataaatagttacagaaagttcagatcaattagagttgaaatttccagaagaaatatgggaccatcctcacacttgccccagcccctcagtcttccctgaggacacctcagcatctaaatcacaactccagagtaggtgctgcagttgtcctgtggccaagatgagaactgtgcatcctccaaaggggagacacaaaacactcaaaataatccatgcagaagggcgtttctgcctgggcatggtggcccatgcctgtaatcttagcacattgggaggccaaggcaggcagatgacctgaggtcacaagcatgagaccagcctggccaacatggtgaaaccctgtctgtactaaaaatacagaaattgggtcgggtgcggtggctcatgtctgtaatcctaggactctagcactctagcggtctggaaggccaaggcgagcagatcacttgaggtcaggagttccagaccaccctagccaacatggttaaatcccatctctactaaaaatacaaaaagtagccaggcttggtggctgtctgtaatcccagctactcgggaggctgatgcaggagaatcgcttgaacccaggaggtggaggttgcagtgaactgagatcgtgccactgcactccagcctggatgacagagtgagactcaaaaatatgccaggaactgacatgacccactttagatttcgctgtgatgtcctcatacagagaaaggcctcgaagatggtctctgtgtctaactgaatctacacctctgtttctttcattctgcctttttttgttttatttttggggtactgcacctatttaaaattctagttacaactgaacactcctttctcacagaagaaaagccacgcccagacacgcactctattttgccaatcatttcaggggccagggtcactcgggttgagcttttctggtgtagcccctcatctccaagttacagggaggctcactggggccacaactgataagtcactgtcctctggctgaagaggggttgcagagggaagctgcctctgacgccatcattataaaagtcaccacacttagacacaggagtttggcaactctcattctcatctgtataatttaaacaaattttaaatttgttaccttataaacagagaaaacaacatgtcatcacttcatcgtcacatccaatcaactcaccgctcatctgcacccagggtcccccttcgtcttcattactgcttccctccatcattctgtacatagctctcattctcaccttctctgaaattgggattagccaggtgtggtagcacctgcctgtcatcctggctccttaggaggctaatgtgggtatcacttgagcccacaaacttgaggctgctgtaagccagaattgttccattgcactccagactgggcccaggagtgacaccctgtctcttaaaagaaaactttcaagtcagagacatattgagtcactagtgtagcttcaaatgcattacaaaatcagacacaaaatatctcccctaatttgtctccatttccagaatttacctgatgccagtgcacattaatgtatgactttcatatacagtttctctgatctggtccacaaagagctaaacgtccatccagatgtggcccctgaacaatccttgctgcccagcatcactgacaccacggagcccacaccccatctccatccatgtctggtgtgagcccttccaggaccatgcccagtgcagcctcttcctaagctcatgtcactaggttataagagatggaatttaagtgaagatgacagggactgagaaaaggcataagtgaatgcaagcaaatgtgtgaggcaggatgcttcagactcacaggagactgactactacaatacctggcatttcagaaaggaaagagacagattaatccaccgagaaatatccacttcacctgaggaagagccaccctggctccttttctttgctcttcttggtgtcttcctcatgtaacaggagtttttggaaatcaatcctgtttgtgaaaaaaaaaaaataagagatttaatgtttagaaaccactcactcctttcctgtgacaaaacacacacacaggggagacctcacccagtaggaagatggtcctctgctgcccaccacaccagagatcatgccaagataacaaagccccacaggaagacctacaagtgtaattttgacccgttttcagatcttgctcccctcctggaaaagtccacacacacactgcagcaggacacagaccttcagggcacagatctggccctaaccaaaccccatgcagagcacagccccctcagctccctgtggatcacaggctgatctcagctctcaacatggaggaaactgccttgattttcaatgctggacacagatgagaatcacctgcaccattgtaagaattattgagggtgggtttaatcctatgataatagcaatctctgataaaacagcttaaaagatgtatttgcaaaatgcctgagaaccctaatgtgaagccagggttgagctccactcagacagcgccagcccagcacagccccaccttctggctctgctctccacttcgggacttgttcccaccaggatccagtgaaaagcgaaggagcaaaaagaatcacaaagaacaggcaacatggaccagaggtgggggtgaaggtggagctgccatgtcaaatgggggactgtgggtgatcacaaacgtttccatagagaaagcaatgtcagaacaaagacttagggatgaaacactgcttgtcacttgtagctgaggggccagagagtcctgggcagagtgacatctcaggtgaaggcactgagacaaaagcaacctcagtcccagaaaaaggaaagaggtgtgcgtggctggagcagagggagtgaggaggacacaggcaggagatgacctcagagaggtcctggaagtgaagatccctagggacgaggtcttgaaacatttttctcccacacctcaaaagaattttggaaatgatgtatttcctcactcctttcatgtatacatgcaactttctctttacattgtaagttacaacactcacaaatagtggaatttatttcccatatttaaaatacatgctgtcagtttcagctaagctcccagaagtacactgtcgccctcatctgagaggtgtaggactgcaagggaatgtgtttgggggttcaagaagtcacttatgacttcttgacacatgaaggtggagatgcctgtttgatgtcccagcagagagctgaagagacaactggacacagaattgtggagctcaggggcgaggcctgcaggggacgtggagtcatacaggtgggctaaagcggtgagatgataaggttcaaggtgatttgattctaatctcattttttccttcttgtgcttttgttttttacatttttggaggactgaaatccatttaaaattcaaattacagctaagcacctccctgtcctaaaggaaaagccacacactccattgtgcccatcatttcaggggtcagtgtcactctgagcttttctggtcttctccctcacctgtatattacaggtgggctcagtgaggttcacagcgggggacgtttcaccaagttatcctgagaagctctgagttttgtaagaaggaggagtcgctgattttcatgtgatggccaggaagggtcaacaggctgcgttggtcatcttcctctataaaattccaggactggccacatgtggtggctcactcctgtaattccagcactttggaaggctgaagcaagtgggtcagttgagcccaggagtttgagacaaacctggcaacatggtgaaactccatctctaacgaaagtacagaaaattagccagacatggtggtgtgcatctgtggtcccagctatttggcaggctgactgggggggatcacttgggcctcagaggcagaggttgctgtgagccaagatcgtgccactgtacttaagcatgggtgacagagtaacactccatttcaaaaaaaggaaaaatattccaggaccatcttttatatccccaagcaaaagaaatgtctctttcaatgtccaaaattctgatggcacgaatcctaaacatgtaaatattttcccagaaaaatgacagtaatacattcaaaataaaaacaattgtgaacacatagctataggtttttaaaacactgaaagagaggcagtggtagaaataagctgtgagcaaatgttttcttcatgaacacgtgggctctgctgaaacaaggttccaagtcaatccagcccatccttcaacatctgcaaagaatattatggaccagaggaacttgaggagaatgtttacttagaaggtcacagttcaccattttatcagatgacataaggaaagaaagtagagtaacaggctacttgaactaaatttttatgttagcataaagaaaataggtcctagggtcaggcgtggtggctcatacctgaaatcccagcactttgggaggccagggcaggtggatcacctaaggtcaggaattcgagaccagcctgaccaacatggagaaaccctgtctctactaaaattacaaaattagctgggtgtggtggtgcatgcctgtaatcccaactatttgggaggctgaggcaggagaaccacttgtaccctggaggcggaagttgcggtgagctgagatcatgccattgcactccagcctgggcaacaagagtgaaactccatctcaaaaaaaaaaaaaaaagaaagaaagaaaatagattcttgacatctttatcaaatatgcattgaaacaacctaaaatcatttatcaggtactagaaagtgtttccaatatgtggtacagactagaaagcatgcagtcttcaatgtaaactggacacaataaatttcatagagaaactatattaaaatggttaaaaatatatacatctaatgaaatgtggggtcaaaggagaaaattttgaacacatagataaaaacaatgatgtgaggttgggtgtggtggctcacgcctgtaatcccagcactttgggaggccaaggttggcagatcacaagatcaggagtttgagaccagcctggccaatatggtgaaaccctgtctctactaaaaatacaaaaattagcctggcatggtggcgggggcctgtagtcccagctactcgggaggctaaggcaggagaatcacttgaacctgagaggtggaggttgcagtgagccgagatcgcgccattgcactccagcctgggcaaaagaatgagactccatctcaaaaaaaaaaatgatatgagctcataaaattctaccaaagcttatttgagaagtagttatttattttatgtttttgagatggagtcttgctctgtcacccaggctggagtgcagtgacatgatctcagctcactgcagcctctgcctcctgggttcaagcgattctcctgcctcaccctcctgagtagctgggattacaggcaccagccaccacacccagctaacctgtattttagtccagatgaggtttcaccatgttggccaggctggtctcaaactgttgctgttacattgggactgaatggaggaggacgaacacgggaatggagtatggagtcaaagacaaaagtatctgtttgcaagaagggatcgggggctctttgcttctagagaacaagagccctgagcttctacagcccttcatatttattgggtagagtaaacagagaggaaggggtaactgtcagtcaactatttaatttaacacaggtgtaagtgattgccttttttgttcaacaggctccagatgtttctgtagataatttcaaggaacatggcacctgggatgtgactgccctcagcattccttctggtggcagattcagttgtcaccttgccaactgctttcacaagaacagtttgctgtttgctcatacagcctccaatggtatactgagttgacaaccctcattccttcagtgtccaacatctccccctttatgtttttgcattaattgaataaaggtaattccaggctgtgcaactttcaattgccagttggtggtccacccagtcttacagactataaacagaaaacagagacataataacattgttcctataagtctaaaagagacattaaggtgatgtttaacgtaggtctaaggattgagactttctaaaccctgctggaattctgtccaagtttctaaagaaggttgaaactcttgagtctgcttattcaagtcaagaattttactttgtatttcactgatatcaaaagcgacattggatgtaaaagccccctgaatatgggcttttacaaggtcccatggatattcgatttggttatattccaaattggctacacaaatgtgagtatggttaaaatgacagtgcaattgctgttgccattgtaaactctgtatttgctcccctaaccacaaaacagtagtctttaacattgccacctaagtttgtaattcagtattaatttgattttgaagcatccatgcctggtcggctgtgcacatccaattttccatatattgggctgtttaaacagagctgtgcagtgctactgaggacaccacaacagaggttattagtgtgactaaggaaacaatagcaaaaattaccatacccaagactctaggagcatgatgagtgagctgagtgagaaggagtttcacaaagtgtaaagccagggcagcagcccaaggttcagacagattgacagggacccatatccaagaatgacatttaccttcttagaaaaacacaaactgtaaattgagtggtaatattccttacaaaggtaacattaaaactgtgttaagtaacattattagtattggagagtgtcccaacccagatgctgccgttcgtaaataggagtgctgctttccatatcgactcctgaattgggcccctctttccttgatgctgccactgaggcaaaggcgagctaaagcctgctctgtgccaagcaagccgcacagccgactgggattgaatcccagtgtgatgtagtgaagagatgttgaaggtctgccaccagtgccagcgaagtttgtgccatgaggtctgattctcatctcttccatctaattaaccacggggtccccagtcaccaatgtctcccattagcatagactgttgtctagctaaaggaccaagacattgggtccaaggaggggggtggtgagaactatcaaagggagcccattctgtataatcaatacaattttggtgatgggggcgggagtggttgatgagcacactagttatattaatagagctaaggcctaataaatacataacttttccatggtgactcaaccatgcctggggttggactgcaagacaactgtggttgagtgacatatctttggtgatgcataaagggagtccctccaatggggcggtataactgatgctattgttgtgagagtttaattgctctatatcagggggagttaggggccctagagcccacgctccctgatcatgatatacctcaggaggaatgtcactccagagtacaggtcacactacagggtgattaggaacatatgcccagtatgttttggcctctacacaggggaaacatacctcacaggacactactgctaacatggccaagcacatggatgctccagcattttctcagcttcctgctttgttttcttgatctgtccccatgttatgggggtggatgtcagtgtgactccagtcggcccttgctccatctttgcattcaaattcagctggctcacgactcctactggagggaccaggtccacggttggccaacgtgggtcctgctagtctcccatttcatggtcgcacacacctggagggcacccacatggtttgtccatctcctgtaaaaacacaagcatactctcgtccccacatcagcaattccaccgggcctttccactgtccctcatctggagatttccataacacctttgggtaaacttgcctcttttcctctaacacttgccaatgtcgttctgctagtcttaccgtctgtaccaggagtcaaaaagtttaaagtaagcaaggctaatgtaattttgcctgaggtggtagttggtctcctattccccctttttgttttttcaacatacgttgtaccgtttgatgtacccactcagtaaggccttgccctcgaggattgtaaggaattcctgttttatgggtgactgcccataactaaaaaattttgaaaggcatcactagcataagcaagttcattgtcagttttcaattgtttagggacccccctatatgggcaaatgacaacaatgtcaccaggcatgaccagctatttcccctgtttggcatgtggcatgcagcatatgggagtaggagtctatagtcacatggacatagctgagtttgccaaaggtggctatattggtaacatccatctgtcagatttcatctggagccaaacctcgtggggtgcatccttctacacgggcaacaccagggacatactggcaagtggggcaggcttgcacaatagcttaagcttggctgcaaggcagatgaaacatacgagtaagtgcagagttgttttgatgcagtaatgcatgagaagcttgggcttgttgaaatatagaaccgatcagtttatctgctctatcattacctagagatagtagtccagggagttgtgtgtgagagtgaatatgagaaatatgaaaaggggaagcatgagagcaaatagcttattggagtcttagaaacaagttaagcagttcttgttctagggtactcttaatagtggcagtctcaatgtgactggctacattcacaacataggctgaatcacagacaatattaataggagataaatctggaagctctaaaaccagaataactgcgattaattctgaacattgagctgaaactgcagaggtctttattgtttgagtgtgtttaggtccagaaacagctgcgtgaaatttggaggaaccatcagtaacataggtctgtccacctgaaataggcctgtgatgagtaatcacaggaaggatgaaagggtgaactttagaaaattgcgagattctttttttttgattgcttttgtcacccaggctggagtgcaatggcacgatcttggctcacggcaacctctgtctcccaggttcaagcaattctcctgcctcagcatcccaagtagctgggattaaaggtgcccgccaccacaccaggctaattttttaatttttagtagagatggggtttcaccatgtttttcaggctggtctcgaactcctgacctcaggcgatctgcctgcctcagcctcccaaagtgctgggattacaggcgtgagccactgagcatggcctaaaattgcaagattttgtctgatggataatggttacctattattcccacaaaatctgcgagagtgatttgccaaccagtcaacatctcccaagctgcagcctgctgtcaggaatccaaaggaacaataattttattaggatcatatcctgtaagcattcctgatctatgcctgcctattgtcataagttgtataattaaagaaagataaacttacaaagttttcactgtctgattggataaaaagagccattctattaccattatggatttctctatgaattggcctaaaagtcctgttggacaatgaggggtaggaagaataaaaaaagcaaaggcttttgtgatttcagccgaaaggcctgtcgtgttgaagcatctgctctacaagctgtaactcagcttctgcctctttagtaagttgccaaggggaatctaatgaagaatctccttggagggtttgataaaggtgtatgagttggtaagtagcaatacctagcatcgtgcacagccaattaatatcccctaataattgttggaaaccgttcagagtttgtaacctgtccctatggacggctactttttgaggctgaacatttctttcagtaaaaatagtacctaagtactggtatggggcggttctttgtaccttttcaggagctattttgagattccattcagttaaggcctgctttatttctctgaataactggtgtaatatttgaactgtaggagcggccaaaagaatatcatccatataatgaacgatgtaggcagtgggaaacatattctgagagtcctttaatgctcttcctacaaaatgctgacttaacgtaggtgttgagcatgccctggggtaaaactttccattgataatgagagacaggctctctatgattaatagagggcacagagaaggaaaatcgaggcttatctttctcatgtaagggtatagtataaaagcagtctttaagatctattactacgagaggccaatctctaggaatggctgttgggaatggtagaccttgctgtagtgcacccatcggttcaatctgtgcattaatagctctcaaatcatgaagcagtcaccattttcatgacttttttgggatcacaaatactggtgaattccaggggctgactcctctgtatgtcctgaatccagttgctcttttaccagctgatggagttgagtcagtttcttctgtgatagggggcattgattcactgccacacaggtttatcagtcacagggaggctcactggggctcagagcggggacattttcaccaagttaccctgagaaggtctgagatgagtgagaaggtgtgtctgaattcttacatggaggcctgaaagagctaatgggaagggttggtctttatcacccctatccttgaaaattagagaagcatctttcatatacctgggctaaagaaacttcttttgcaacgttctgatgccactgactcccaacatttaattcttccttacaagaaaatcacagtaacatttataaactgcagaagtgtgaacacacagctattgactgtgaaaacagtgaaagaagttcagccgtagagctaagacataagcaaattttttcaatcaagaatacatgggtggccaggcatggtggctcaggcctgtaatcccagcactttcagaggtcaaggtgggtggctcacctagggtcacgagttcaagaccaacctggccaacatggtgaaaccgcatctctactaaaaatacaaaaaattacctggtagtggtggtgggcacctgtaatcccagctattcaggaggctgaggcaggacaattgcttgaacccgggagacagcagttgcagtgagctgagatctcgccattgcactccagcctgagcaacaagagtgaaaatacatctcaaaaaaaaaaaaaaaagaagctgggcgcggtgactcacgcctgtaatcccagcactttgggaggccgaggcgggtggatcacctgagtgggttcaagaccagcctggccaacatggtgaaaccccatctctactaaatatacaaaaattagccgggtatggtggcaggcacctgtaatcccagctactcagggggctaaggcaggagaatcgcttgaacccgggaggcaaaggttgcagtgagctgagatcacgccactgcactccagcctgggcaacaagagcgcaacttcatctgaaaatgaaaaaagagagaaatggagaagaaccagaaagaaaaaagaggaaatctattacacaatgagaaaaaaagcgcttttgatattccttttgttttttattttttgtttgtttgcttttttgagatggagactcactctgccacccaggctgcagtgcagtggcacaattttggctcactgcaacctctacctcctaggatcaagtgattctcatgcctcagcctcccaagtaactggaactacagatgcacgccaccacgcctggctaacttttgtatttttagtagagacagggtttcaccatgttgaccagggtgcttttgaactcctgactttaggtgattcgctcacttcggtctcccaaagtgctggaattacagtcatgagccaccacgtccggctttgatgtcccttttaaaaagtattatgggctgggtgtggtagctcacacctgtaatgccagcactttggaaggccaaggcgggtgggtcaattgaggtcggaagttcaagaccagcctaacatagagaaaccctgtctctgctaaaaatacaaaattagctgggcatggtggtgcatgcctttaatcccagctacttgggagactaaggcaaaagaatcgcttgaaccggggaagtagatgttgtggtgagccgagattgcgccattgcactccagggtgggaaacaaaagcgaaactccgtctgaaaaaaaaaaaaagtactatgtaggagaagcgtggtggctcatccctgtaatcccagtactttgggagtccaaacaggaggatcatttaagcccgggattttgagaccagcctgggaaacacagtaaaaccccatttctacaaaaaacaaaaacaaaaaaacaaaaaaaaacaaaactagccgggcttggtggctcacgcctgtggtcccaactacttggtaggctgaggtaggaggacagcttgagcccaggaggtcgaggctacagttagagatcacgccactgcactccagcctgggtgatagagccagacactgtttcaaaatattatttaattaattaaattaaaagtcacatgtaataacagaaagtgcttttgtctccccacttcactgccccacttcctatgccaccctgggaaaagggaagagagtgactcacaactgaataagtcactgccctctggctgaatagggattccaagtggaagctgacctctgatgccaagatttatagaatgtacatgactcatagataggaattttaaaattctcaatctcatctgtataatttaaacaagtttttagttattagattatatacacagaagtcaacatgtcacactaatcatatccaatgaactcacccactcatctgaacccaaagtccccaccccttttattcttttgagacagggtctcactctgttgaccaggttggagtgcagtggcatatctcggctcactgcagcctggatctcctgggctcaagtgatcctcctgcctcagcctccagagtagttgggattacaagtgcgcaccatccccttctttggtctatttcttctcttccacctcttctgctccatcctcacaacttacttaacctcttgttgcttcttcttcccagtctttcgatcgtcctcaatctccatacattaccacctcttctcccacctctgcgcctcctctgctctccctgttaaactctctcttccctgttaaaccccctgtccccactctctggcacccccgacctccaggtgtcctccctgctgtggttctccctcttgccaccagcaccactctgctctgtctgccctggctccaaatccctcctcctctccctcactctgatgagccaggtccccctctttgctgcccctctccctaccttgctgtccttcatctctctgtacatctagcttctctccacatttctccagttttctcctcctgctatcttaactttttcttttcactcttgctgtctcttggcaaatccctcacccatcctccaccttgccatctgttatgggcctttctcattgttctattctctgtctcgagttttctactgcccttgctcggtctcctgattcctttggcccacacaatcacaggagagttttgagtaagacgcctgcatcccagaggagtgcattttccaggggctggggctgggcaggcaagaacaccccttgtcacaggacaagccctgggcacctccccaacgcggactcagaggaagcggcgactgctgaggggagacctggcgagcagcagggcccggcacgaggagggagttagggggcgacggctccttaagacaagggtggggtctgcaggatcccaggaccaggcagaggatgcggcctcctcgggacgggggaggcggcgctgcgctccagggaccgacgagggtgagggtgggaggcgcccagggtgggaatccacctctcgggtgaggactttaaaaagcacggggtggagggagtcagaaaatagttacaaacaggaaaactacgagatacgaagtgtatacgttgccctatagcagaaagaccggggacgggtctagcctcagggcgactttaaacccaaaaggaagcgacttctggactctcaccgggacgtcaaattttgctctggggattagccgggcctggtggcgcatgcctgtaatcccagctactcaggaggctgaggcaggagaatcgcttgaacccaggaggcggaggttgcagtgagccaagaccgagccactgcactccagcctggcgacagagcgagactccgtctcaaaaaaaaaaaaaaaaaaaaaaaaaaatttgctctgggcgaaggaagaatggtagaaatttccaggtatgtggggaccccacgtcccctgggacagaagtcccagggacctgcggagcgcagacataacacaacacagagcaaaactcaccgctgcggtgactttcactccacgcgatccgcttcccggtttacgctaaactgggcgctcgggacagaagccaggtctcggcgggacatggcagggggtgggcggggcctgggcgaggtgggggcggggcgcgaggcggagagaccttcccctatagaaccggcagggggcggggcgcgaggcggagagaccttcccctatagaaccggcagggggcggggcgcgaggcggagagaccttcccctatagaaccggcagagggcggggcgggatctgtgagtctctcagcctcggcgtgtttttgggttttggagacgagacctgccaggaaagctgaggcatgattcaaaagccctggaactgtctggaaggggaatgcaaaccagaatgtgaaatgcaaagccctgcctgggcggaacgtattatttcatgctgacgaccacagaacagaatagaaatcctctccctttctattctccactcactcaagagggagagtccaccctgtgtcagcttcagagacttccctagagccaccgcctgggatgcgggatggagtgctcaggccagggaggagtgaggtcaccacctgctggttaaacacagcagagatgcgggcgcacaagggggcgtgggagggcgcggggtgggatcctgagttcccagctactcaggaagcagcggcgggaggatcgctgagcctggggctccaggccagcctgggcgataaagtaacaccccctcccgcaggactcccttcctcgtcactctctctctgttttttgttttgttttgtttttaaactttcgtaaataaaattttttatggtgtgagacagggatccaacattatttttttccatgtggatatccagttacttgtcccagcacatttgtggaagagctctattactttcttttttcacttacttttttcttttctttttcttttttatttatttatttattttttttgagacagagtatttgtctgtcgcccaggctgcagtgcagtggcgagatctcagctcactgcacactctgcctcctgggttgaagcgattctcctgcctcaacctccagaatagctggcattacaggcgtgcgcccccatgcccggctaagttttgtattttttggtagagacgaggtttaacagtgttggccaggctggtctcgaactcctgactttaagttatctgcctgcctcagcctcccaaagtactgagtttacaggcgtgagttaccgtgcctgtcccaagaaataccctttttctttctttcttttttgagacggagtctcgtattgtcaccccagctgctgtgcagtggcgcgttcttggcttgctgcaacttacgcctcccgggttcaagcgattctcctgcctcagcctcccgagtagctaggaatacaggcgcctgccaccatgcctggctaattttttgtctactaaaaagtagagaccaggtttcactatgttggccaggctgttcttgaactcctgacctcgtaatctgccccactcggcctcccaaagtgctgggattacaggcgtgagccaccgcgcctggccaagaaatactctttacttcactttttaaatgttgagaaaatataattgaaaacaaaaaaaatcttcccctaaatgagatatcatctccaccacgataataaaagactttgccacatacatcactttcatattgtttctctccctctcccaaatggattatcggatgtttccttaagagtgagctacaattaaaggctttgccactctcactacattggaaagatttttcggccgggcgcggtggctcacgcctgtaatcccaacactttgggaggccgaggcgggtggatcactaggtcaggagatcgagaccattctggctaacatggtgaaaccccgtctctactaaaaatacaaaaaaattagccaagcgtggcggcgggcgcctgtaatcccagctactcgggaggctgaggcaggagaatggcgtgaacccgggaggcggagcttgcagagagccgagattgcgccactgcactccagcctgggcgacagagcgagactccgtctcaaaaaaaaaaaaaaaaaaaaaaggaaaacagcaagctatcgtgtttcctaccttcaaaacacggaaattttcaaaacttgcaggataaaataccacaacaaaacatttatcatgccgagctcagtggctcacgcctgaaatcccaacactttgggagtctgaggagggaggatcacttgaggccaggagttccagaccacctggccaatatggtgaaaccccatctctactaaaaataaacaaacagccaggcttggtggtgcacacctgtagtcccaactactctgaacgctgaggcatgagaatcccttgaacctggggggcggagtctgcaatgagctgagattgctccactgcgctccagtctgggtgacaggcgcattcatcaaagaattttttctaaaatctcaaaatggtgtctgaatacatttctgtaggacttacgctgacttgccacagaactctcagcagtgattccccattgagccatgggaacgggtggaaggctggacaggaaaggggatgcgtaagtgaacttttctttgaatttttactacacaacacatatatacattgtgtggtctttaaaatttaaaaaaattaataatgggtagaagaagaatatggctccatcttctctaatgataagttctgctctgacgtcagaacaaaattataatcatttttacctaaaatgcctgcttcatcagagttcctgcaaaaaaaaaaaacactttttttttcttttttttgagacagagtcttgctctgtcacccaggctgcggtgcagtggcgagatctcggctcactgcaacctccacctgccggattcaagcgattctcctgcctcagtctccccagtaggtgggactacaggctggcctgccaccacgcccggctaattttttgtatttttagtagagacggggtttcaccgtgtttcgatctcctgacctcgtgatccgcccgcctcggcctcccaaagtgctgggattacaggcgtgagccgccgcgcccagccaaaaaagaaaactttaataactttaaacatcagccatcacacggtgtgtgtgcgtgtgtgtgtgtgtgtgtaaataatctaggtaaactacaaaattagccgggtaaatgtaatggaatacatgcttgtaaacaaacttgtcataatttgtgatctaaggttattatttgacattagcaatctgggtaatttccagtttaagaattacaggggccgtggtggctcaaccctgtaatcccagcactttgggaggccgaggcgggcggatgcacgaggtcaggagatcaacaccagcctggccatcatggtgaaaccccgtctctactaaaaatacaaaaatcagctggccgtggtggcgcgcgcctgtagtcccaactactcgggaggctgaggcaggagaatcgcttgaacccaggaggaggaggttgcagtgagcagagattgccccactacactccagcctacgcgatagagccatagagcgagactacgtctaaaaacaaacaaactcagtctaaaaacaaacgaacaaaaaaacaacaacaaaaaaaaaaagaagaagagaaaatacagttacaaattttctaaataaatgtcctgagaaaagaaaggaagggaaagttgtccttcacctccagtgtgcaataggcagttccacatgcaggtcaccctccatgttccattatccgctcaaacaacacaggacctcgcttaaacaagccgttttctggggtttttttgtttgcttgattgtttgtttgagacggaatcttgctctgtcgcccaggctggagtgcagtggcgcgatctcagctcgctgcaagctccgcctcccgggttcacgccattctcctggctcagcctcctgagtagctgggactacaggcgcccgccaccatgcccggctaattttttatatttttagcagagacggggtttcaccgtgttagccaggatggtctcgatctcctgaactcgtgatccacccgcctcggcctcccaaagtgctgggattacaggagtgagccaccgcgcccggccccttaagctgttctaattctcagtcctggctgcaaccagcgccacactccacccttttaccgaggtccttgcccctcgccctccccctaccccagctaccccaggctgcggggagctcgccccgcctgcaggacgggcgtctttacctgctcacaaaaggcactttgcatttaaaccattttcaaattaagaagaaaaacaggtaattccagcactttcggaggccgaggagggcggatcacctgaggtaaagagttagagaccagcctggccaacatggcgaaactccgtttctactaaaaatacaaaaattagcccggcttggtggtgggcacctgtaatcccagctactcgggaggcggaggcaggagaatcgcttgaactcgggaggtgaaggttgtggtgagcccagatcacaacattgcactctagcctgggcaacaagagcgaaactccgtcttaagaaaaaaaaagaaaagaaaagctaccagttacacagcagggctcctcagaaagcagggggaacacctgtttcaagtttttcttgtataggggcctacgtaaaagctaactgccggtgggctgatggtgtgacaaaacttactactttgttgatttaaaacgatccttggtattttagtgtgcaagtacttgaaagcatggctgtaattatcttagaagcacacattgtcatgagatattgggtcatgtggacattgtgtttctgtaggagtttgtccttgcaaatatcattaagctgctttccttaaccattaacatcttatgactttgactcgcgcagtaaggagtacgttttcctagttttaatggacttgagctttgacatcctggttctcctaggttcctgcttaacagtgtatccactcatgcaccacagagtctcagcaccattatggaagacaccactctagtaatatatcaaagacagactgagcatctactccaataacataaatagtaatagcaatgctacggaaaatattaggaagtttaatgtatgtatacaattgatcatttattattttcagttttatattggctaaaactacattggatgggttattttaatcaaatattagaaatatctttcaaaactgcgatctaatataaacacacacagtttgagaccatttcctctatgttcaatatatatgaaagagttcagatttatgaacttattttatgtttttcattagatctagtttgttttctatcttgatttcttctgtgttcatgagcttgtgaaccaaaagtatctaataggtctcaattaatttagaaagtttactttgccaaggttaacgatgtgttttttgcagccaatgtggtccagatgcagctgggttttatacattttaggaagacaggagacataaatcaataaatgtaagatgtacattggtttggtcttgaaaggcagagtaatgaaaatcagagacttccaggttataggtagacaacagataaatgatagcatttttaaaatttatttttatttatttatttatttatttatttatttttagagtcttgctctgtcgctcaggctggagtgcagtggcgcaatctcagctcactgcagcctctgcctcccgggttcaagcgattctcctgcctcagcctcctaagtatctgggattacaggcacacgccaccatgactggcaaaatgtttaaattcacctatagcctgaaaccaacccatcccgctttgagttgccccacctttctggaccaaaccaatgtatttgttaaatgtatctcattgatgtttcatgcctctctagaatgtacaaaaccaagctgtgcccccaaccacctgtggcccatgttctcaggacctcctgaggactgtgtcatgggccagctcactcatatttggctcagaataaatcttttccagtattttacagagtttgactcttttcatcaacactaatattgctatgtcattaatttctaaatatattgtaatttcaaattcaccatgtgcattctgtaataagacaaatttcattttaaaattgtaacgtattttagatattttctttgttttctgtttctcaatgttctgtcacgtgtggatagcaaagccaataaaatactcttcagaagtcatttagatttattttcccttagagaaaaaataattttgcaatatttctaaagataaatggcaggcaagttattttctttcataggaactctcaagaaaggacaactcggccaggcgcactggctcatgcctgtaatcccagcactttgggaggcagaggcagggggatcacgaggtcaagaggtcgaggccatcctggctaacacggtgaaaccccgtttccactaaaaattagctggatgtggtggtgcgcactctagtcccagctactcaggaggctgaggcaggagaatcgcttgaacccgggaggcagaggttgcagtgagccaagattgcatcactgcattctggcctggagacagagcaaaaaaaaaaaaaaaaaaaggacaactcaattattaaatgtttacaagtagcctcatttcttcaggcaataattccatggcaatctccaacttaacatgtaatatggaagtatgttttcctgtcacagcattataattctgtattatgcaatattgctaagtagccaaaaaagaacactgagcctggacttccatgcttccatgcaaaaaaaaaaaaaaagaattgattgtgacagtttttgttaacctcagaacggtagacaagaagctgattgtagcggaaagtcatgattccattttgtatatgtaaagttttgttgcttctagaaatgtcaaggaagcaacatggacatactgattcacaagaaatttaaaagaatatttcctgccgggtgtggtggcccacacctgtaatcccagcactttgggaggccaagtcgggcggatcacctgaggtcagtagttcaagaccagcctgaccaacatggagaaactccgtctctactaaaaatacagaattagccgggtgtggtggcacatggctctaatcccagctactcaggaggtggaggcaggagaatcacttgaacccgggaggcggaggttacagtgagctgagatagcaccactgcactccagcctgggcaacaagagagaaactccatctcaaaaaaaaaaaaaaaaaaaaggattttcttaatcacagaaagattttgacatatacatccttgtaatatcattataagagaaatgcaaagtaattagatgtttccaaaaagttaaaatagaaactacttgttttttgaaaaagggtctcactctgtcactcaggctggagtgcagtggtgccatctcagctcactgcagcctcaacctttctggttcaggtgatcctcccacctcagcctccctagtagctgggactacagggcgtgccaccacgcccagctaatttttgtattttttagtagagatgggtttcgccaagttgcccaggttggtttctgactcctgggctcaagccatctggccgcctttgctttcaaacgtgctgggattacaggcatgagccaccatgcctgaaactactttcatctattgagcttatattatagccagtgtcacaggaaaaagcatgtgcatattctaacacagacggaacaatgaaaatgtttactactgggccgggcgcggtggctcatgcctgtaatcccagcactttgggaggctgaggcaggtggatcacaaggtcaggaaatcgagaccatcctggctaacatggtgaaaccccatctctactaaaaatacaaaaaattagctgggcgcggtggtgagcacctgtagtcccagctactcaggaggctgaggcaagagaatggtgtgaacccgggaggcggagcttgcagtgagccgagattgcaccactgcactccggcctgggcgaaacagagagactccgtctcaaaaaaaaaaaaaaaaagaaaactaaaaagaaaatgtttactactgtcaaaaaacaaatttagatattggttagattttattcaaaaggtatattgcaatagggaaaatgctccaaccccaagatctgcaaatatatgagttgcacagaaaagggcttctcttttataaggagaaggaagcaaggttagaaagcgccaggtacagggcagtggataagcatctgctgtgacctattcagtgaatattttatcctaaggtcagcttactcttgggatgggacattaaaaaggcaaagttgggctggacgccatggctcatgcctgtaatcctagcactttgggacaccaaggcgggtggatcgcttgaggacgggagttcaagaccagcctggccaacatggtgaaaccctgtctctactaaaaataaaaaaattagctgggggtggtggcacaggtctgtaatcccagctactggggagtttgaggcaggagaatcacttcaacccgggaggcagagcttgcagtaagccaagactccatctctaaaacaaacaaacaaacaaagagaagttgttctcaatcacagtgcccatatgtggttaagaaatagaggttgttagccgggcacggcggctcatgcctgtaatcgcagcactttgagaggccaaggcaggtggatcacctgaggtcaggagttcgagaccagcctgaccaacatggagaaaccctgtctctactaaaaatacaaaattagccaggcacagtggcgcatgcctgtaatcccaggtactcgggaggctgaggcaggagaatcacctgaatctgggaggcagaggttgcagtgagccgatatcatgccattgcactccagcctgggcaacaagagtgaaactgcctcaaaaaaaaaaaaaaaaaaaaaaaaaaaagagagagagagagaaatagaggttgttctgaatttcaatggccaagaatagtccaacagtcaggggcttggagaaacagggaagcctaaggtttgagtaagttaagaagcattgtttccaccatcagtgagaaatccttgatgagacaaaccgtgggaatttggagttttttcttatgtaaacaaagagggtaagctttgaagtaagctgtttctagggaaaacaaaaacaagggattgggcaggggagtggtttccggtgggttttatttgtttttttgtttgtttgtttttgtttttgtttttgttttgcttttgccctagaggcctcaagaggcctggggaacatgtgctcctctggtggtttcttcaatctttgctatttcttcaaccctttactaggtttacagggttgtaataaacttcaacactgtcaccacacgtaacataaaacaaaatttaaaaaataataaatataggccaggcgcagtggctcacacctgtaatcccagcactttgggaggccgaggcaggcggatcacctgagatcaggagcgagaccagcctcaccaatatgaagaaactccgtctctactaaaaatatacaaaatagccaggtgtggtggtgcatgcctgtaatcccaactactcaggaggctgaggcaggagaatcgcttgaacccaggaggcggaggttactgtgagccgagattgcaccattgtactccagcctaggcaacaagagcgaaactccgtctccaagagaaaaaataataatacatgtgtagaatttgaaaaatagaactaaaaataggaacaatagcgatgttgccccatacctcagtttttgaatggaacgaaagggccttgagtgttcattttggctgtgtgttattcattcctatcacatacaagagacattagtaattattggaagatatggctctaaatctctaaattcaggggtctgtgtaactgttaaattgaacagaaacctagagatatattaagacaaatagtgggctgggtgcgatggctcacacctgtaatcctagtactttgggaaactgaggcgggtgaactgcctgagctcaggagtttgagaccagcctgagcaacatggtgaaaccctatctcaagtaaaaatacaaaaaaattagccaggcgtggtggtgtgagcctgtaatcccagctaatcgggaggctgaggcaggagaattgcttgaacctacctgggaggcagaggttgcagtgagccaagatcacaccactgcactccaacctgggtgacagagcgagactctgtctccaaaagaaaaagaaaaagaaaaatggtgtttccttttccattttcctgctgaccatggaaaaacacactctcacagttttatcaattctttggtaacaattacaaaatgcaagcactggttcacgtcgacagcccagagtccgcaaatcctctgctctgagcccgtccggacttccccgatcccagccttctctcctttgaaaacactaagaatgacatcactgcatcagtttttactagagccaatcacctgtcgtgcctggaacagggatcgtacccagattgccctcagtcctgataatcaggaagcgcacatctataagaagcatgggagccagcgagtgaaagctcgtgaactcagtgagcacaatggacatatcacaggcattcactgggctcccaagagcgaccgcatcgtcacttgcggggtagactgcaatgcctatgtctggagtcagaaagatggtgtctggaagccaaccctggtgatccttagaattaatcgtgcagctacttttgtgaagtggtccccgctagagaacaaatttgctgtgggaagtggagcatgactcatttgtttgttactttgagtctgaaaatgactggtgggtaagcaagcatattaaaaagccgattcgctccacagtcctcagcttggattggcatcccaacaatgttttgctggcagcaggatcatgtgacttcaaatgcagagtgttttctgcttacattaaagaagtggatgaaaagccagccagcatgccctggggcaccaagatgccttttgggcagctgatgtcagagtttggtggcagtggcaccggtggctgggtccacggggtaagcttctctgccagtgggagccgcctggcctgggtcagccacgacagcaccgttatctgttgctgatgcctcaaaaagtgtgcaggtctcaattctgaagacagagttcctaccactcctgagtgtgtcatttgtctcagagaacagtgtcgtggctgctggccatgactgctacccaatgctctttaattatgatgaccgcggctgcctgaccttcgtctccaagttagacattccaaaacagagcatccaacgcaacatgtctgccatagaacacttccgcaacatggacacgagggccacgattgaggaccacaacatggccttggagaggctgcaccagaatagcatcactcacgtctctatttatgaggtagacaagcaaggttgtcgcaaattttgcactactggcattgatggagccatgacaatttgggatttcaagaccctcgagtcttccatccaggtcctccacataatgtgaagctgagtgagccttcgccatctagcatgacaaactgtggccaaccgcagctgtgccgtggcacgatggcgaggaagctagacccaaggaaacactgaaaacacatagcaggccaatgctgtgtggttttgtttgaatataaaattggtgaaaatgctggtttttttaaagcagtatttttttttttatttttttattttttttgcgatttcattccattcttgaccaaagcttccctttaagtagtttattatggaaaattgtcacactaacttaaaagacagggtgagggagatatgtaaattgtccactagaaaattaaataaaagaactaaatgtgggaaaaaaaaaaagaaagaaagaaaatacaagcacttaggtcgggtgcagtggcttacgcctgtaatcccagcactttgggaggctaaggcgggtggatcacctgaggtggggagtttgagaccagcctgaccaacatggagaaaccccatctctactaaaaatacaaaattagccaagcacagtggtgcatgcctgtaatcccagttactcgggaggttgaggcagaagaatcgcttgaacccaggaggtggaggttgcagtgagccgagatggcgccactgcatgccagcttgggcaacgaaagcggaaaaaagaggccgggcatggtggctcacacctttgggagcactttgggaggctgaggtgggtaaatcacctgaggtccggagtttgagaccagcctggccaacatggtgaaacccatctctactaaaaattaaaaaaaaaattatctgggcatgctggcgggcgcccataatcccagctacttgggaggctaaggcaggagaatcccttgaacctgggaggcagaggttacggtgtgccgagattgcaccactacactccagcctgggtgacagagtgagactccctccccaccgcccccccaaaaaaaaagaaaaaagaaaagaaaatactagcactaatttatatgtcagattcatgtcacatctcaaattcatctaaattttcttgacatccctttttataccagtggagccctgatgaagacacttaatagaagttttctctctatcagagaaataagttgatgagaataaactcaacgaaggtgaaaattctgtttttttctgtgacctgggggaaaaagcttaaggtgaatttacattcagattggttatacagagagaacatacagaagtggatgaactcggtgtaattaagtttttctatccacaaaccaggtgaaagtattgcaggaggcagatagcgaggcatgagcaggtaaggagattctgtgtcacccgcaaggggtcctgatccagaacctaagagagggttcttggatctcacgcaaggaagaattcaaggtgaatccatacagtaaagtgaaagcaagtttattaagagagtaaaggaataaagtatggctactccatagtcagagcagcctcctgtttcatcctatgactaagaatgccttcacttactgggaatgtaacccagcaggtctcaggcttattttctccagcccctattccagatggaattgctctggttcaaatgtctctgacactttggaaaggaatatttagaaatgcaactcactggccaggcacagtggctcatgcctgtaatcccagcactttgggaggccgagacaggtggatcacgaggtcaggagatcaagaccatcctggctaacacagtgaaactccatctctactaaaaatacaaaaacttagctggcctggtggtgggcgcatgtagtcccagctactcaggaggctgaggcaggagaatggcgtgaacccgggaggcggagcttgcaatgagccgagatcgggccactgcactccagcctgggtgacagagcgagactctgtctcaaaaaaaaaaaaaaaagaaaagaaaaaagaaaaaagaaatgcaactcactgagagtctccttaaagatgctgcccactgacagcaagaaaagatcagtggctacattgcctccacctggccttgtggctgcactcctctggcccagaaggggacttatcaggggctagctggacataatcgagatgggggattttccccattaacaaccatgtgtacttctgcaataacccaccctagaagagccttctgctcaaaatgatactgaaacacacatccctggctggagatttgagatgctaatgagatatgtgacgtgtgtaccagcacggaccgtcacagggctttcctgatcagaggacttcctggaacgtgcttactaggaacatccctgcacagccccttcatgaataatcatgtcagattctcacaaaaaggctctgcccaacactagtagggacaggctcattcttttgaggagcccaccctgctccactgttcagggtatctcttctttccgagctcctacgcctttagataaagggcacttacctgcttaactctttctgcgtgtctcttgactgaattcaaggagaccaagaaccagaggacttccacgcccctcctggtaacatctggtgttttcccctggtggcctgtgaactgttcttctgggtaagtgccaaaaagctggtgccagatcctctggttgacgacctctgcttctttctgcactgaagaacctcctgccctaatgcagatcttgcagccttaaggggaggggcttttcctctcgggctctgttcactatcaactgcccagtaccatttcccttcagccactgtcactctgctccctctggctgacttctcagctcaccctgaggggtgacaagcagaggagggaggatttaaactccacagtgagtagatctgagacacggtgaccctccctgcaggaggcttgtgaaggtggcagaaaatccaccctggctgtgcagtgactggggagcttcatatcttcaactaaaactactattccatgttgagtcggctcttctacttgctgttcatggcagttcattctcctggacacaatatgccgccaccggtgaataatcccccaggtcactctgcttactctttgctgtccctgtcctcgtcgccgggcttccttgaattcctccttcgtgtacaagtgccttgtctgtcctgcttgtctgggacctgctgcgtttgcttcactgccaatcgccggaggcctgcccgggcctgtgaggaagtttatacttattttttccctagagatgagacccagcttcgtcctttcagttgcctcctttctcactgcagggaccggcactggcaggatgctcgcttacaggcatccctcgtttactatcgggtccttctccgcccgactactcttcaagaatgcctcattctgtggctcctcaagcgagctgtctggttcctccggatggtcatttataggcctctttctcagaccccagtttctctttacaaccggggtttcctgtgggtcaatgggaagttcttcatccgcctcctcaagccattgttacagacctgtacggcagtcaggtgctttttgtattatgttgaaaaagctgacagaaaatgcccccggcactccccttgctgcttatgtgatcatatcagggacgtaaaaaaccagaatcaacagcccagtccactaactctgagccccaggggccttccatgcctgtttaagcattttttctgtatgatccccaaggaacctactatgaccaggggaagatatcaaatttacctccattcctctaaccatctgtatgcattaatccaatattatcatgcattaaggggaccttaccatggagtcccttctctgcagactttagcaggggcagaactactggacttcttgcagaaccaaggtcactgggaatatgagagacaagagaactactcccatgcccgacgttcttacatgcttcctggcccaacacagaggtgagaaaggcgtccctcctaggcatcaatcctaggaaatctaagaaaggcttctgagcaaaatgagatacagggagacaatggatggtgcaaatgctaaggctagctaattctggagccccagggtgaagaaccaatcatccctgtaaatagaggcatggacacttcacctaggccaaggtgtggaatgcctcaccttcctgaggcacccaataggtggagagatgccttctctatcctatattcattcctgtcttctctttcagatgggtaaccagagctccgtaccccaggattcccctctcggatgcatccttagaaactgggataagtttgatccccaggcattgaaacgaaaaagattggtttttctttgcaatacagtttggccaaaatatgaactagaagggcaggaagcctggccagtggggggaagcttaaatgttaataccatactccagcttgacgtctactgccgacagcagcgcaaatggtcagaggtcccttatgtgcaaaccttcatgatcttgagggaaaaccccgatttttgtaaaggctgcaagatagatcctgcccttttagctatcctcagtcgtccactccagagacctcaaccaggaggcttcaatgatttcctggtcaacccacctcaacctcctcttcctgagaccaaagagaaagagcaagcacccccagctccttcctccttgtatcgcactcttagccttcatgggtcagcctcaacctacactaggccctcaggcccccgctctggaatctgcctgctaccagtggtgagccgaccagtaggaccagtccaagtccaggtccccttttccatgcaggacttgtcccaagttaaggaaggcctgggaaaattctcagagaatccgggaaaattcctggagggcttccgtaaattaaccctcacttttgaactaacctggaaggatgtcgccatcctcctaggacaaaccctgtctctggaagaaagacagaccatctgggaggcagcacgtcaatgcggggatgagctacacttggcagatgccaactaccccgtgggagctacagctgtccccctgcaggaccccaactgggactacgataccccggcaggaatctgcgccagaaatcatatgctcctatgcctgatagagggaatgaaaaggagtcaagtcaagcctgtcaattataataagttagcaaccatcgaccaagggccacatgagaatcccacggcctttctcgaaaggctccaggaaactcttatcaaacataccaacctagacccgggatccccagaaggacaactagtcctaaaggatcacttcctcacacaagctgccccagacattaggagaaaactgcgaatgctggctttgggaactagagcccccatgtcagaaatcctcaaattcgcttcctcagtgttttataaccgagaccaggatgagagggacagggccgagaggaaggaaaaacagaaagaagagaggcaggctcaattactagctgctttgcaagttcaccagccccctccaggttgccctaaggataccttcccagggaactgctatcagtgcgggaagccgggccattggaaggcaaactgcccctacgggccaaggggggaaaagccctgcacggcctgtcccctctgccgtaagctcaggtactggaaagagaactgtcccgagagccaaaagggcccctgagccaatgatggctttgagctgagggtgccctctgccttggccagctcccagatgtgacatcatcatcaaagggatggagcccagggcaactctggatgtagcaggtaggacaatacattttctatttgatttgagagcagcctgctcggtgctgacccccttctctaggcaactttcctctgtcaggtaatcagggtaaatggcatctcttcctaagatttacaccttctttattgttaaaagaccaattaatcttttcccatgagttcctgatactgtctgaatgtcccatacgtctttagggcagggatatactctccaaactaggggcacgcttcacatttacctgaacttccctgaaaggctttctttttttttggaagactcacccatgacattgctgaattatcttgatctggaatcacaaataaccctgagatatgggctttgatacactaggaagggcaataactgcagtcccagtcaaaatccagctaagaaaaccttccacttctttcataagaaacaatactcgctatggccagaggcaacagaaggacttgagcctatcattaacccattccttagacatggcctgttaaagtctgtaactctccctgcaacacaggaaatctattctgctggtagaaaacatttaaagggttctccactactgaaccctgattaagtctggttttctgatggcggcagtttcatccaacatggagtgacacatgcagttatgcaatagtgtctctatttgacattatagaagccaaatcccttcctccaagaacattggcacagctagcagagctcatttccttaactagagccatagaaatagggaaaaacccaaaagctacaatttatacagattcaaaatatgccctctcaggactccatgctcatgtggccatctggaaggaacagggatttttaccagcaaaagatacccctaaggaatgtggaccacagatcctggccctgctctaagctgtacacctatcacaggaaatagctgtagtccatggccagggacaccaaaggaccagggagaaaatgcccagcaaaacaggagggtggatcaaacagccaggaccactaccctgtagggaactcctcatggcccttaacccatctttacccaacaccttacccacccacaaaaacccaagaggaaaaggaatgggctatcaaatatgaatctacccgagaacctgaggtgtggtatacagtgggaggaattctccactttcctaggccctccagtaaaaacttgtgagagcactccatgagtcatgtcactttgggagacatcatctccagcacatgtgcaaaaacctcttttccaggaaagggctctactagactatttgtcaggtctttaacacctgtgcatcctgtgcctgtaatagcccccagggccctacgctgccctgcttttttttttttttttttttttttttgagtcaaagtttcactcttagtacccaggctggagtgcaacggcgtgatctcagctcatcgcaatctctccctcccaagttcaagcgattctcctgcctcagcctcctgagtagctgggattacaggcaggtgccaccaaaaaaagaccaaaaaaaatttttttttttttttggtatttttagtagagatggggtttctccatgctggtcagactggtcttgaactcccaacctcaggtaatccgcctgcctcggcctcccaaagtgctgggattacaggcatgagccaccgtgcccagccaaatttttttttttgttcaatgttgcccaggttggcctcaaacgcgtagccttgcctccttgtgacccaggacaaccggccagagccaatgcagctccctgtcctgcttagttgagccagttcagcattgggaagcttacccagggaaagactgatggatgtatttcactcaattgccagcctgtagaggctataaatgccttctggtgtttgtggacacctttattgggtgggttaaagcctttcctacaagaacagaaaaggcccaggaagtagccaaggtacttcttaaaaaaaaaaaaaaaatcatcccggccgggcgtggtggctcacttctgtaatctcagcactttgggaggccgaggcaggcggatcacgaggtcagagaattgagaccatcctggctaacacagtgaaatcctgtctctactaaaaaagagaaaaaattaggtgggtgtggtagcgggcgcctatagtcccagctactcaggaggctgaggcagaagaatggtgtgaacccgggaggtggagcttgtggtgagctgagattgtgccactgcactccagcctggacaacagagcgagactccgtctcaaaaacaaaaagaaaaaaaaaatcacccctcagtgtgggtttagtttgtgtttacaaagtgacaacggcccagtttttatttcacgcaccctttaattagtgacaaaagccctagaaataaagtactcctagcactcctggagaacacattcctctggcaaggtagaaagcactaatcaaactattaaaaggaccctgaacaaagtgtgccaggaaacctcctcaccatggttagaactcctgtccgtagcactgttctgagcatgacccctaatattacttatgccttcctacatgcagacctaatgttagatccagaagttacccaattaatcaaatacataacatcactggcccaatttcaacaagccatccaggagtttgagcaaaaggtactgcctgccactgacccctccagtaatcaacccttatactagccagggtcacaagtcctcatcaaaacctggagagatgggtcacccaggtctcaactagcctgggtctctcctttatggaaaggcccctttattactttctaccccgacagctatcaaagtttctggaatctctagttggatacatcactcctgagtaaaactgtgagaaggtcccgaagaaccaacaacagaatcagcatctgagtagtctcatgagccagccactggagagcttccaattcctcttcaagtgaaaagataagtaaagccttctctcctttcacctcaaaaaaaggtctctcagtacggggaatcttggttgcggtggcatcggttcttctccttattttgacccacactggcatgccacctgaagtcccgataacagcctgatttctcactaaacactccatcgaaccatttcattatttgtctctcctattttcagcactttccttttgctttcacaaagcttaagggagaatcagctatgacagagaaattccttttcctttatctttccctccttcccatgcccctactctcacaggcacagtggaatgaaaattcccttgtcagtttttccaaaataattgcttcgggaaaccatctaagcaactgttggatctgccacaacttcatcaccaggtcctcatcttaccaatatattttggtaagaaatttttctttaaacctaacatttggttcaggaatccctgaaggccaacataaatctgttccgctccaggtttcgcttgctaactcagcgcaccaagtcccctgcctggatctcactccacctttcaatcaaagctctaaaacttctttctatttctacaactgctcttctctaaaccaaacctgttgtccatgccctgaaggacactgtgacaggaagaacacctctgaggagggattccccagtcccaccatccatcccatgagcttctccccagcaggctgccaccctaacttgactcactggtgtccagctaaacaaatgaacgattatcgagacaagtcaccccaaaaccgctgtgcagcttgggaaggaaaagagctaatcacatggagggttctatatttgcttcccaaggcacacactgtccccacatggccaaaatctactgttcccctgggagggcctctatcccctgcatgcaatcaaactattccagcagggtggaaatcgcagttacacaagtggttcgacagccacatcccccggtgggcctgtacccctcctggctatgtatttttatgtgggccacaaaaaaataaactgccctttgatggaagtcctaagataacttattcaaccccccctgtggcaaacctctacacttgcattaataacatccaacatacgggagaatgtgctgtgggacttttgggaccacgggggataggtgtgaccatttataacaccacccaacccagacagaaaagagctctgggtctaatactggcagggatgggtgcggccataggaatgatcgccccatggggagggttcacttatcatgatgtcaccctcagaaatctctccagacaaatagacaacatagctaagagtaccagagatagcatctctaaactcaaggcctccatagattctctagcaaatgtagtcatgaacaacagattggccttagattacctcttagcagagcagggtggagtctgtgcagtgatcagtaaatcctgttgcatttatgtcaataacagtggggcgatagaggaggatataaaaaagatctatgatgaggttacgtggctccataactttggaaaaggtgattcagcagggtccatttgggaggctgtgaagtctgccctcccctccctcacatggtttgtccctttactgggaccagctgcacttaatagcctgctttctcctctttggcccttgtctctataattcactaattaaatatgtctcttccaggatatggcaatttcacacagagcccctaaaaatggaaagagatcatccaatcttccttggaggtcccagcacctacaagtacatatctcccttggatgccagtgggcaaagattctgcaactacggaggggctccttccctgacagagagcaagagagggagaccctgatgacttcttcgtcccacgtcagcaggaagtagttacagaagacccacgacgtccttatgcccaaagcttttcagggtctccaactcttgagggggaatactgttagggtaggcaggtagccagacaagagcaggcaaggaagcccctgggaaaggaatctttagaaatgcagcccgctgatggcctccttggaaacgctgcacgctgagtcagcaaaaggaggagcgtggctacactggctacacctggccttgtggctgcattcctctgttccagaagggaacttatcaaggcccagccagaggttaccaaggtaggagctattccccactaagaagcatgtatacttctctaataattcaccctaatataccattttgttcattaaaataataaaaaaaaccacacacctgtgtggagattttattttttaaccagaaattccttgttagactttagatccaaatgacatggcacatgtgtgcccagaccagttcccaacacatgcttactagtaacgcccctgcatgaccccttcatgaataatcatgtaaaattctcataagaagcatctccccagccaggtgtggtggctcacgcctgtaatcccaacactttgggaggctgaggcaggcagatcacctgaggtcgggagcgcgagaccagcctgaccaacatggagaaaccccgtctctactaaaaatacaaaattagctgggcgtggtggcgcatgcctgtaatcccagctacttgggaggctgaggcaggagaatcgcttgaacccgggaggcagaggttgtgttgagccaagatcgtgccattccactccagcctgggcaacgagaggggaactccatctcaaaaaacgaacaaacaaaaagaagcgtctccccagcattggtgagacagactcattcatttgagcagcccagcctgttctgtctttcagggtgtactgtttatttaaaagcccccataaaaattcctcccaggccaggcatggtggctcaggcctgtaatccctgcacttccttgggcggatcctcagacagatcacagctcaggagtttgagaccagcctgacaaacatggcgaaaccccgtctctactaaaaatacaaaaaaattagccgggcctggtggcacgcacctgtaatcccagctactcaggaggctgagggaggagaatcacttgaaaccaggaggcggaggttgcagtgagccaagattgcgccactgcactccagcctgggctacaggagactccatctggggagggcggcggggaattcctcctaagtcactagcagctgactcactctctgcagcagccagttctgtctcttcttgacctcctgtctttaaataaaggttacttaacgatttaactctttctgtgtgcctcctagatgaattctttccttcaggaagataaactgaaggacctccacacccctcctggtaacaaaggtctttgtgcaatccctcctgaagaagcaatggaggatttagtatatctaaactagtaaatacaaactgtactcaattatccaagaaatcattgaagaaacactctttactccattttttatatcttgggaaaaatataattaaagacaaaataatatttgccaaacccagaaatcctcaccaaaaaggaaaaaaataaataaacaatcccagttggtggctggtgaatgcttctaccttaatcaatacatgttttgaagctgtcagcttctttttgctcataagtgactccacagaatctagtctttgctttgccctctagacaaggaatacagaatttttaaatcttatcagaaacatataaattgtttggttttgcacaatatttactaattttctccactcatccactgtggagtcatagcacaaaatgaggcaccaccctctcgtattgcaactaaaacagactgagcttctgctccataaccataaacagtaatagcaatactaattgaaagatgaagtaattttacgtaagtaggtataaaactgataattcattgttattttcagttttacaataagtgggaattacatagaataaatctttctctctctctctttctatttctgacagtcccgctctgtcgcacaggccaaagtgccatggggtgacctcagcttactgcaacctccgcttcctgggttcaagtaactcttgtgcctcagtctcctgagtagctgggattgcaggtgtacaccaccttgcttggctaatttttgtatttttcatagagatgaaatttcactatgttggccagagtggtctcaaactcccaacctcagatgatcagcctgccttggtctcccaaggtgctgggattacaggcatgagccaccacacccaacggagttttcactcatttactttaatcatcatgggttagagatatagcttttaaaaatgtaattgaatatacccttacagttaggatctaaaaagagcatttcctctattaatgtttattaaataatatggtggaactcagacttgctctgttgcccaagttggagtgcagtggcatgatcttggctcaatgcaatctctacctcatgggtttaagtgattctcgtgcctcagcctcctgagtagctgggattgcaggcatacaccaccatgcctggctaaattttgtatttttactagagacagggtttcaccatgttgctcaggttagtctcgaactcctggccacaagtgatccacccaccttggcctcccaaagtgctgggattgcaggtgtgagccaccacaccagcttaattttttttctttttcttttcttttcttttcttttttttttgagatggagtttcactcttgttgtccaggctggagtgcagtggcacaatctcagctcactacaacctgcacctcctgggttcaagtgattctcctgcctcagcctcctgagtagctgggattacaggcatgtgccaccatgcctaattttgtatttttagtagagatggggtttctccatgttagttaggctggtcttgaactcccgacctcaggtgatctgcccgtctcagcttcccaaagtgctgggattacaggcgtgagccatcgtgcccagcaattttttctatctgagtttcttccgtactaatcagcttgtgatagacacatggtttctgaaacagaaaagtgcaagggctttttatgagcagggtgtggaagactaccagtaacaaatgctttggcataagtgatgagtgagaaggggagtgagagtctctactgtcctacctactaattgtgctttgggaatttggattgaaaaaagccaccttaatggtgtttggttatcatttattctcccccacctggcaggaaataaggacagggtccccaaagctgctagggcacttagggtggatatgaaacattaaaatatgaaacattaaaacttcacttgcttgaaaccagagcagccaccaaactgctcaaaattactgccaatgatgtcttgcttcctggcattcagaaaccttctccttctctacccctgactcttccttccctctctatcccaatctcaatcaccttaaggaagagctgagtatcctgaaaaatttgaaaggaaaaaagagattcaaacttttgtagctctcttggtaagaggtgccccaatcaccttccgaggagaaatgctttgtaggagtgtctcaaaccaccaagacctgtgggaccaagcacatatggggcccataggaagaagccactgagcctcaggatcctccagatgctgggaggtacatggagcagcaggcagcattatgcttgtatcaagcacccaaggagaaaacaaggccactgagctgccccagccttccctgacatgattgtctcctatggccctgggtttgtttggagacctgcaacataactgtaattcctccttctcctttgtgagttcaaactaagggtaggtttgctaccagtcttttaaaaaagattggtgccactcttgcttacagggcagagaaggcacccagaatggtggccactggcaccccactcccaagccaataccacctctagtgtaaccatgcacacaatctccagaaggggaccccagcccctgacccagctgcattgtctctgccactgtggtgaacacttgcatggaggcaggtactctggcgccctctagcactctggctcttgaggagtcagaggaaaacactggggcccaatacaagtcccctaaagttagagcacacagtccagataagtgctggccccctaaaatcttccagaaatgaagccagtcagctgaatccaccttataccacaatccacaatcaaaccctcaaggtcatcaaatagttatgataaaagtaaaaaacaaaaacaaaaaacaatcctcatccaaaggtcagcaacctcaaagactgaaggtagataagcccaaaaagatgagaaagaatcagtgcaagaaccctggaaactcaaaaagctagagtgccttttttcttccaaacaactgcatcacctttccagcaaggtttctgcaccatgcagagatggcagaaataacagaaatagaactcaaaatgtggataaggacaaagttcattgagctatgggagtatgttgaaacccaatccaagaaagataacaaacacataaaacaatgggattatgtaaagaggccaaatctatgattcactggtgtccctgaaagagagtgaaaccaatttggaaaatatatttttgcatattatccatgagaacttccccaacctagctagagaggccaacattcaaattcaggaaatgcagagaaccccagtaagatacttcacaagaagatcatacccaagccacataatcatcagattctccaaggtcaaaatgaaagaaaaaatgttaaaggaagctagagagaaaggtcaggtcacctacaaaggaaagcccataagagcagacatctcagcagaaagcctacaagctagaagagattgagggccaatatttaacattcttaaagaaaagaaattccaacccacaatttcatagttggccaaagtaagcttcataagcgaaagagaaataagatccttttcagagaagcaaatgctgagggaattcattaccatcagacctgcagtacaagagctcctgaagaaagcattaaatatggaaagaccattaccaaccactacaaaaacacactaaaggacatagatcagttacactataccacctaacaccatgataacggatcaaatccacacatatcaatattaaccttaaatgtaaatgggcagccagctggatgcagtggctcatgcctgtaaccccagcactttgggaggtggaggtgggtggatcatgacattaggagtttcagaccagcctggccaacatggtgaaaccccatctctactaaaaacacaaaaattagctgggcatggtggtgcatgcctatagtcctagctactcaggaggctgaggcaggagaatcgcttcagccccagaggcggaggctgcagtcagctgagattatgccattgcactccagcctgggcaacagagcaagactctgtctcaggaaaaaaaaaaaaaaaagtaaatggcctaaatgccccaattaagagacagactggcaaggtgggtaaagaaccaaaacccactggtatgctgtctccaagagacccatctcacaagcagtgacacacataggcttaaaataaagaaatggacaaaaatccaagtctttgctattgtgaatagtgccacaataaatatacgtgtgcatgtgtctttagagcagcatgatttataatcctttgggtatatacccagtaataggatggctgggtcaaatggtatttctagttatagatccctgaggaatcgccacaccgacttccacaatggttgaactagtttacagtcccaccaacagtgtaaaagtgttcctatttctccacatcctctccagcacctgttgtttcctgactttttaatgatcgccattctaactggtgtgagatggtatctcattgtggttttgattagcatttctctgatggccagtgatgatgagcattttttcatgtgtctgttggctgcataaatgtcttcttttgagaagtgtctgttcatatccttcgcccactttttgatggggttgtctttttcttgtaaatttgtttgagttcattgtagattctggatattagccctttatcagatgagtaggttgcaaaaattttctcccattctgtaggttgtctattcactctgatggtttcttttgctttgcagaagctccttagtttcattagatcccatttgtcaattttggcttttgttgccattgcttttggtgttttagtcatgaagtccttgcccatgcctatgtcctgaatggtattgcctaggttttcttctagggtttttatggttttaggtctagcatgtaagtctttaatccatcttgaattaatttttgtataaggtgtaaggaagggatccagtttcagctttctacatatggctagccagttttcccaacacaaatgtccaacaatgatagactcgattaagaaaacgtggcacatatacaccatggaatactatgcagccataaaaaatgatgagttcatgtcctttgtagggacatggatgaagctggaaaccatcattctcagcaaactattgcaaggacaaaaaaccaaacaccgcatgttctcactcataggtgggaattgaagaatgagaacacatgaacacaggaaggggaacatcacacacccggaactgttgtggggtggggggagggagggatagcattaggagatacacctaatgctaaatgatgagttgatgggtgcagcacaccaacatggcacatgtatacatatgtcacaaacctgcatgttgtgcacgtgtaccctaaaacttaaagtataataataaaaaaaagagaaaaaaaacctgcttattaggaaagcagagtaattatagaatgtaaaattagtgaaaaaatttatgaaattttgcctttataatgatatttaaaataaataccatcatgcctcttttgcaggtaaagaaaatgaaaaactagaatatttaggctcagggtggggtaactttaaaaaagaaggactggtcatgtctatacaatacaatatccttcctcccctaataaactaactcctaaaataaaaaaataaaaaataaataaatggacaaaaatctaccaagaaaatggaaaacagaaaaaaagcagggggccaggtgcaatggctcatggctataatcccaggactttgggagaccgaggcaggaggatcacttgaggccaggagttcaagaccagcttggccaacatggtgaaatgctgtctctactaaaaatacaaaaaattagctgggcatgggggcttgtgcctgtaatcccagctactagggaagctgatgcaggagaattacttgcacaccggaggtggaggttgcagtgaactgagattgcaccactggtctccagcctgggcaacagagcaagactccaactcaaaaagaaaaaaaggaaagaaaaagaaaaaaaaaagcaggggttgcaattctagtttctaacaaaacagactttaaaccaacaaagattctaaaaagacaaggaagggcattacataatggtaaagggttcaatttgacaagaagagctaactatcctgaatacatatgtacgcaacacaggagcaccctgtattcctaatgcaggaacttgctcaaaatgcaggttcttagagactttcaaagagacttacactcccacataataacagtgggagactttaacaccccactggcaatatcagacagatcattcacacagaaaattaacaaaaatattcaggacttgaattcagcactggatcaaatggacctgacagacatctacggaactctctactcaaaaacaatagtatatacattctccccattgtcacatggcacacactcctttttttttttttttttttttttttgagatggagtctcactctgtcccccaggctggagtgcagtggcacgatctcggctcactgcaacctccgcctcccaggtacaagcaattctctgcctcagcctccaaagtagctgggattacaggcacctgccatgatgcccggctaatttttgttatttttagtagagatggggtttcaccatcttggccaaactgctcttgaacttctgacctcatgattcacccacctcagcctcccaaagtgctgggattacaggcgtgagccacggcacctggccggcacacactcttaaatagatcacataattgaaagtaaaatactcctcagcaaatgcaaaataactgaaatcataacaacctctttgatcatagtgcaatcaagtcagaaatcaagactaagaaattcgttcaaaaccatatattacacagaaattgaatcacttgctccagaatgacttttacctctataattgacaattcttgtctcccatcttgctctttcttcttaaatttccttggctattccctccaagatgatgttggataagaggagactagaagctccttagtgtcatttctgactttagtgtgactttctgtaacatgtcccagatgtttgtcaatttgatgaagatatatcacttcctagttcactatttttaggtaacattatttcctgttaaatactgccaattttttttgcatttatgaatgtgggcaccttatttttctctcaacatagagagaccccatctctacaaaaaaatacaaaaatcagccaggcatggtggcacatgcctttggtcccagctattcaggagactgagatgagaggatcatgtgaacctgggagagggaggttgcagtgagtgagtcaagatcatgaacgctgcactccagcctgggtgacagaatgagaccctgcatgaaaaaaaaagactgcatggcattggtggggagtgatatatatatccatggaacagaatagagaatgcacaaatattttcctttcaactgatatttgataaagataccaaagcaggccaggtatggtggctcacgcctgtaatcccagcactttgggaggccgaggcaggcagatcacgaggtcaagaaattgagaccatcctggccaatgtggtgaaaccccgtctctactaaaaatacaaaaattagctgggtgtggtgacacgtgcctgcaatcccagttactcgggaggctgaggcaggagaatcacttgaacccaggagacggaggttgcagtgagccgagatcatgccactgcactccagccaggcggcagtgagactccatctcaaaaaaaaaattaaaaaaaaaaaagataccaaagcaattgaaagcaggactttcaaataatggtgctggaccaaatgaatatccacaatgaaaaaagatcaatctgcacctaaatttgacactcattcaaaaaggaccatgttgtgaaatgcaaaataaagaaaccatcaaatgttaatctatcaagaattagaaaaacatactgtaaactaattgggaacaagcacaccaaagagttcatagatatgacaccaaaagcatggaaaaaaatgataaatgaaacttcgtcaagttaaaacttctggtctgtgataccaatggaacagaacagagaacccagaaataaggccacaaacctgcaactatctgatcttcgatgaagctgacaaaaacaagcaatggagataacactctctacttaataaatgatgctgggataactggctagccacatgtagaagactgaagctggacctcttccttataccacacaaaaaattaagtcaagatgaatcaaagacttaaatgagaaatcccaaactataaaacacatggaagataatctaggcaataccatcctggacatacaaatggacaaagatttcataacgaagacaccaaaagcaattacaacaaaagcaaaaattgacaaatgggatctaattacaccaaagagcttccacatagcaaaagaaactatcgcaatgaatagaaaaccgtacagaatgtgagaaacttttgtgcaaactatgcacctgacgagtctaatatccagcatctatgaggaacttacacaaaattataagaataaaacaaccccattaaaaagtgggcaaaggacatgaacatttttcaaaagaagacatatggcccagctcaatggctcaaacctataatcccagcactttgggaggccaatcctggtggatcacctgaggtcaggagttccagaccagcttggccaacatggtgaaaccccgtctctactaaaaatacaaaaattagccacgcgtggtggctcacgcctgtaatcccagccactcgggaggaagaggcaggagaattgcttgaacccgagagaggcggtggttgcagtgagccaagatcgtgccactgcactccagcctgggcaacagagtgagactatgtctccaaaaaaaaaaaagacagaaaaaagaaacaacccagagcacaggaaaagggaagacgcctgtgtggctggaacagacggagtgagcgctcactagcaggagataaggtcagagatgtcctggggaagcagatcagatagggacaaggtcttcaaacaactctctcccacaccacaaaagaaattggaaatgatttatttcctcacctgttttaagtaaacatttaacttttttctttctcgtagaagagaaagtgatcaactgtaccacatactaccaaaaggaagagaaagatgaggacaggaagttaaatattgcatttaaaaatggggaggttctctgggcgcagtggctcacatctgtaatcccagctctcagggaggcagaggcgagaggatagctagagcccaggagttcgagacccgcctgggcaatatagcaagaccccgttgttctccacaaaaagcaaaaaaaaaaaaaagacaaaaaaaagtgtaggccaggtgtggcgactcacgcttgtaatcccagcactttgggaggccaaggcgggcagatcatgaggtcaagagatcgagaccgtcctggcaaacatggtgaaaccccacctctactgaaaatacaaaaattagttgggcgtggtgcgcgtgcctgtagttccagctactcaggaggctgaggcaggagaattgcttgaacctgggaggcggaggttgcagtgaaccgagatgcaccactgcactcccgcctgcgcgacagagcaactctcaaaaaacaaaaaaaaaaaagtgtaaaaatggggaggttggctgggctcagtgactcacacctgtaatcccagtactttgggaggccaaagtgggcaaatcacaatcaccttaggtcaggagtttgagaccagcctggctaacatggtgaagccccgcctctactaaaaatacaaaaattagctgggtgtggtggtgcatgcctgtaatcccagctactcaggaggctgacgctggagaattgcttgaatccgggaggcggagtttgcagtgagcagagatcatgccactgcactccagcctggatgacagagtgagactccgtctcaaaaaaaaaaaaaaaaaagaaagaaagaaatgggaagtcactgatgattgaaaaagaagggatcagttgaatgctggaagtgaatgtttgattcaagcaagaattcaagggttcaagtaaaagttggaggcaagacttgaagagaaagtaaaagcaagctttcagagtatgacattctttctttctttcttttcttttttttttttttttgagatggagttttactcttgttgcccaggctggagtgcaatggtgcaatctcagctcactgcaacctccacctcccaggttcaagcaattctcccgcctcagcctcccaatagctgtgattacaggcatgtgccaccacgcctggcaaatttttgtatttttagtagacacagggtttcaccatgttggccagtctggtttcaaactcctgatctcaggtgatccacccgccttagcctcccaaagtgctgagattacaggcgtaaaccactgtgcctggccacgagtatgacattctcaaaggggctcagaagaggggaattaccatagagggaaatatagttaccactaatttttgttttaaagatggtgaagggggcctgcccctccacacctgtgggtatttctcgcaaggtggagatgagagactgagaaaagaaataagacacggagccttgggcccaggggaccggcgctcagcatacgaaggacccgcaccggcactggtctctgagttccctcagtatttattgatcactatctctactatctcagcaagggggatgtggcaggactataaggtaatggtggggagagggtcagcaggaaaacatgtgagcaaaggactctgtgtcataaataagtttaaggaaaggtgctgtgcctcaatgtgcatgtagaccagatttatgtttgactttacacaagcatctcagtgcagtaaagagcagtattgcccccagcatgtctcacctccagccataaggcagttttctcctatctcagcaaatagaatgtatgatcaggttttacaccgagacattccattcccagggatgagcaggagacagatgctttcctcttatctcaactgcaaagaggccgtcctctttcactaatcctcctcagcacataccctttacgggtgttgggctgggggatggtcaggtctttcccttcccatgaggccatatctcaggctatgtcagtgggggggaaaccttggacaatgcccaggctttctcaggcagaggtccctgcggccttccgcagtgcattgtgtccccgggtactcgagactggagaatggtgatgacttttaccaagcatactgcctgcaaacacattttaacaaagcacatcctgcacagccctaaatccattaaatcttgagtcaacacagcatatgtttctgcgagcacagggttggagctagggttacagattaacagcatctcaaggcagaagaatttttcttagaacagatcaaaatggagtttcttatgttttcctttttctacatagacaaagtaacagtctgacctatctttcttcccccaacaagatgggcgagcagaagggaaaaaatggctttattctgtatgtgtgcatgtgtgtttatgtgtcttttaaaggagaagaccatcattggagtatgctgatgaaaataattcccttgagcctggcgcggtggctcatgcctgtaatcccagcactttgggaggccaaggcaggtggatcacgaggtcaggagttcgagaccaggctgaccaacatggtgaaactccatctctactaaaaatacaaaaattagccgggcttggtggcacgtgcctgtaatctcagctactcaggaggctggggcaggagaatcgcttgaacccgggaggtggaggttgcagtgagctgagatcgtgccactgcactccagcctgggcaactgagcaagactccatctcaaaaaaaaaaaaaaaatcagagcttagtcttcacttgtgaaatagatttgtgaagggagcacctgcatccttggagagctctgtgattgatcttctctgtatgccagatcttacaatgggaaccagtcactcaattgaaaaacttaaatgcagtgggaataactggatcttaaggaggtagggaccaactagcgagacttatggcccctcaatttccagacttgagccagtttacagacccaggatcccttgaatgaaagggaagctggatttccttaagaaaagatctcactgcacgacaatttatactgtcaatctttctcccatcctttgccaaggagaccgctggccttttaccagggtaaatatgcattgaggaaagtggaatgatcagaccttttggggactagtggacccggctctgagctaacattgattccaggggacccaaaacatcattttggtcctcagttacagtaggggtttatgggagatcagataattaatggagttttagctcaggtctgatttacagtgagtccagtgtgtccccagactcatcctgtggtcatttccccggtgccaaaatgcataaatggaatagacatacttagcagcaggcagaatccccgcattagcttgctgactagtagagtgagggctattatggtgggaaaggccaaacggaagccactagagctgcctccatctagaagaattgcaaataaaaaacatcacaggccaggtacagtggctcacacctataatcccatcactttgggaggttgaggctggtggatcacgaggtcaggagtttaagaccagcctgaccaatatggtgaaactccgtatctactaaaaatataaaaatacaggctgggcgcggtggctcacgcatgtaatcccagcactttgggaggccaaggtggtcagatcacgagatcaggagttggagaccagctccaacagtaaaaccccatctctactaaaaatacaaaaattagctgggcatggtgtcatgtgcctgtgatcccagctgctcaaaaggcagaggcaggagaatcgcttgaatctgggaggtcaaagttggagtgagctgagacggcgccaatgcattccagcctcggcgacagagcaagactccgtctcaaaaaaaaaaaaaaagacaaaaaaaccccacaaaagttagctgggcgtggtggcgcacacctgtagtcccaactacttgggaggctgaggcaggagaatcgcttgaacccaggaggtggaggttgcagtgagctgagatcgcgctgcactccagcctgggcgttaaagcaagactccatctcaaaaacgaacaaaaacaacaacatcatgtctctggacttgaaagatccaggggtggtgattcccaccacatctccactcagctctcttatttggcctgtgcagaaggcaggtggatcttggagaatgacagtggattatcataagctcaaccaagtggtgcctccaatggcagctgctgtaccagatgtggtttcactgctcgagcacattaccacatctcctggtaactggtatgcagccactgatttggctaactgcttttttttccttccattcctgtccataaggcccactagaaggaatctgccttcagctggcaagaccagcaatataccttccctgtcctgccttggaggaatacgggctctccagctttatgtcataatcttgctcacagagatcttgatcagttcgctttcataagatatcacactgctcctttacattgatgacgttatgctgagtgggcccagtgagcaacaagtagcaaccacactgaatttattggtgagacatttgtatgccaggggatgagaaataaatctgggtaaaattcaggattctttcgcctcagtgaaatttctaggggtccggtggtgtggggccggtcaagatatttttcttttctttttttttttttttaaatggagttttgctcttgttgcccaggctggagtgcaatgactcgatctcggctcactgcaacctctgcctcccaggttcaagcaattctcctgcctcagcctcctgagtagctgggattacaggcattcgccaccatacccggctaactttttgtatttttagtagagacggggtttcaccatgttggtcagactggccttgaactcctgacttcaggtgatccgcccgcctcggcctcccaaagtgctgggattacaggcatgagccactgcgtccggccaagatcttccttctaaggtgaacgataagttgctgcatttggcccttcctacaacaaagaaagaggcataacgcctagtgggcctgtttggatttggagacaacacatttctcatttgggtgtgttactccagcccatttatcaagtgatccaaaaggctgccaatgttgagtgtggtccagaacagaagactccacaacagctccaagctgttgtgcaagctgctctgccactgggccatatgacccagcagatccaatggtacttgaagtgtcagtggcagataggcatgctgtttggagcctttgtcaggcccctaaaggtgaatcatagtggggcctctgggattttggagcaagggcctaccatcctctgcagataactactcaccttttgaaagacagctcccagcctgttgctgggccttggtagaaactgaatatttgactatgggtcaccaagttacaatgagacctgatctgcctatcatgaactgggtattttctgattcatggagccataaagctgtgcatgcccagcagcattccatcatcaaatggaaatggtatatatgtgattgggctcaagcagttcctgaaggcacaaggaagttacatgagaaagtggctcaaatggccaggcatggtggctcacacctacaatcccagcactttgggaggccaaggtgggcggattgcttgaggtcaggggttcgagaccagcttggtcaacaaggcaaaaccccatctctactaaaaatacaaaaattagccgggtgtggtggtgcatgcctgtaatcccagctactcaggaggctgaggcaggagaatcgcttgaacccgggaggtggaggttgcagtgaactgagattgtgccactgcactccagcctgggtgacagaatgagactccatctcaaaaaaaaaaaaaaaaaaaaaagagaaagtggctcaaatgcctatggtctctactcctgccatcctgccttctctccctcagcctgcatcaacatcctcatggggagttccctatgatcagttaacagagcaaaagaagactagggcccagtttacagatggttctgcatgatatgcagttaccacctgaaagtagacagctgcagcaccttctaggacatccctgaagaatagtggtgaagggaaatcttcccagtgggcagaactttgagcagcacagctggttgtgcacttcggtttgaaggagaaatggccagatgtgtgattctatactgactcatgagttgtagctaatggtttggctggatggtcagggacttggaagaagcatgattggaaaattggtggcagaaaaatctggagaacttccatccaaatgttgatggacccgagtggtcaaaaacagtgaagatatttgtgtcccacatgaatgttcaccaaaggatgacctcagcagaggaggattttaataatgaaatggataggataactcattctgtggataccactcagcctctttccccagccactcctgtcatcacccaatgggctcatgaacaaagtggccatggtagcagggatggaggttacacatgggctcagcaatatggacttccattcaccaaggctgacctggctatggccaccgctgagtgcccaatttgccaggagcagagaccaacactgagccctcaatatggcaccattccttgggagtgatcagccaggtacttggtggcaggtcttccatcatggaaagggcagcagtttgtccttgctggaatagacacttaggccagatatggatttgcctttcctgtgattctcccacctcggtctcccaagtagtagctgagattataggcgtgcattaccacgcccagctaatttttgttttttctctgtttttttgagacggattctcgctctgtcacccaggctggagtgcagtggtgtgatctcagctcactgcaagctccacctcctgggatgacaccattctcctgcctcagcctcccgagtagctgggactacaggtgcccaccaccacgcctggctaattttttgtatttttagtagagatggggtttcaccgtgttagccagatggtctcgatctcctgatcttgtgatctgcccgcctcggcctcccaaagtgctgaatttttgtattttcagtagagatggggtttcaccatgttggcaaggctgatcttgaactcctgaccccaggtgatccgcccgcctcggccttccaaagtgctgggattacaggtgtgagccacagcgcccagctgactgctgaacttttttttttttttttttgaaatggagttcacctttgttgcccaggttggagtgcagtggcacgatctcggctcaccacaacctctgcctcccaggttcaagtgattctcctgcctcagcctcccaagtagctgggattacaggcatgcaccaccacacctggctaattttgtatttttagtagagaaggggtttctccatgttggtcaggctggtctcgaactcccgacctcaggtgatctgctcactttggcctcccaaagtgctgggaataatgagccaccaagcccagccccaagaaaaaaagttttttttttcaaagctgaagcctggaagaacatataggtgactaaaaattagacaaaaagaaaaaaaaaaaaacagaaaaaaagtcaatgtagtacaccgcactgacaaagtgaaggacaaaaatcacgtgatcagctcaattgatgcataaaaagtatttgagaaaatccaatactgttcatgattttaaaaaaccatttaaactagaaagagaagaaaataccagaacatgagatttagctgtgatttcttggatacaatatgaaaagcactggcagaaaagcaaaaacagatgaaaggaactacatctaaatgaaaaacttctgtgcatcaaaagagaatgctccagcaaggatgtagaagagcgagctcctgtttcccaacacaaaagtaaaatctcaaaacttgcaggttaaaatatcacaataaaacattcactgaaaaacatgttttaaatctcatatcgatgtataaatacgttactataaatcttgtgctgactcttgccatgaactgagaatggtggttctccactgagcacgaggaaggaagcggaacagaaaagacgatgtgttacatcttagtgcctaagctataagtttggagttttactataaaacattcaccatgtgatgttcaaaataaaatagaatatttaataattattgggttaaaaaaatggttcaattctctccaatggcaaagaagctgtgattcactgtatgagcacagtgataaccattctcacctaaaacacagttcacaggggttcctccaggaatacaacatctctgttctggtctgtctgaaaatagtttaatgtatctcctgctgtttgacatttatgttgacttcatatattaaaatgtgaggaatgaaaaaatcctatcactgatgtttccatctaaactttccattccattcccagtcattaagagtttgaactcagaaacacagtgactcacttgttcagttccaaatataataaaaacgaggcaggaaagatttccccatagtgttctcattttaaagcattcaacaggaacttgtgcatattaatacctgacgtcatgggcaacttcttgaatcctggtctacaaagaggtggcatacatccaaatgtggctcctaaacaatccctgctccccagaagcactgaaaccacaaggcccacaccccatctccaatccatgtctgggtgtcagcccttccaaggaccatgcccagcagagcctcttcagaagttcatgtcactaggtcatgcaggatggaatctaagtgagatgagagggactgagggaaggcatgcgtgagtgagcaaacatgtcaggcaggatgtttcaaagatttgcaatgacattttgttacagtaggtagcttacctggtatgagaaggagagggctccccctccccattcacacacatcaggaatgagccaggcaaccatcaggtgatggtcaggtggttgttaactgtctctctaaaataataattagtcacagccggcaccagggaaaggcatagatagaaaacacctgaaactggtgatcagcctcttcccatgagatctcaggagttgggcgagtggactaaagcatgtgcatgtggacagcccaccccaaggcaagaacagcccaccccaaggaagcaagaccccggaagtatgccaacgtataaaaccctaagtcaaaaggtcaaactgcacacttgcctttcaagtcgatcacttggccctcttccaagtgtactttccttcctttcagttctgctctaaagctttttctttttttttgagtcaaagtctcactttgtcgcccaggctggagtgcagtggtgtgatctcggctcaccacaacctccacctccagggttcaagtgattctcctgcctcagcctcccgagtagctgggactacaggcgtgcaccagtaggctcggctaatttttgtatttttagtagagacggggtttccccatcttagccaggctggtattgagctcctgacctcaggtgatccgcctgccccggcctccgaaagtgctgagattacaggcatgagccaccacacccagaaaaaaatttaaaatttaatatgtgttatattataaacagagaaatcaatatgtcacaatttaatcaactcatccaatcaacacccccaaccttgttcattattctgtgtttccctcccttattccgtacatatctctcattctcatcttctctaactcttgggttcttttctgtttccccctgggtttctgctcctcattttgagcctctctcctctcttgctgtttctccgcttcttcctgctattccatcttttccacctgttctgctccagtcttacaacttgtttcacctcctgtccctctttctccccaatcactggattgtccccagtgtccatacatttctgcctctgtctttccccatctctgcttcccctgttaaattccctcttccctgtttacacccccttgtcctcagtctctagcaccctcagatccctaggcttacactgaggtctatgatccattctgagttaatttatgcacaaaacgtgaggtttttgtctggatttttttcttttttgcatttggatgtccagttgttccagcaccaaaactcaaacagaaacacacaatctgaacaggcctatagcttttaatgaatttgaaccaataatccctgagcaccctgctgtggttcttcttctgctctccttgtcaccagttgccccttcttgctgtcccagcaccacgctgctgcctgccgtggctccaaatccctcctcctctccctcactctctgtctgaggagcctcccctctgctgcccctctccctaccttgctgtccttcacctttctggacatggagcttttctctacatttctccagttgtttccccatcctgttactttctcagcttcttctttgactcttcctgtctcttcgcgaatcccccacgcatcctccattttgccatctgtttatgggtttccctcattctctgtctcagtttgtctacttctctcgcagtccctgtttccagatccccttggcccacacattcacaggagggtttagggtaagacacctgcatcccgcaggagcacatttttccagggggtggagctgggaaggcaagaacaccaggtgtcacaggacaggccctgggcacctccctaacgcgggctcaggggaagcggggactgcaaacgagaggcctggggagcagcagggcccagcaagagttggagggaggtgggggcgaaggcgccttaggataggggtggggtctgcaggatcccgccaggcagaggacgcagcctccctgggactggggctgcggggccgacgagggcgaggctgggaggcgcccaggacgcgactccacctcgcgggtgaggacttgaaaaagtgcggggcaggatgaggggtcagtacagggtttcgaacggaaaaatttaaggaaagaacatgtctacatgacctgaaggcagaaacaccggcgacggaaccagcctcagaatgattttaccccaaatcactgaaacgaccccaagagtctcatagcgatgtgtgacttactagcagtgaggggagcggtatgagaattttcaggcgtgtacgaacctccaaatccggggtatggaggtgagaggactgcgaagcccaagtttaatcttaataatagacagagggaaatccacgcgccgccataccaggttcactccgcgcgatctgtttccgggtctgcaggaaactaagcgcagagcggaatcctgggcgggtcccgcgagcgacggcgtcgggagggaagaaggaagggggcggggcctccgcggagtgggggggcctatgctttcctcttctggctcccatggcatctctatttttcgggtttaggaggcaacatttaccagtgaggctgaagcaactcagcaggatctccctggggcagggcaaaccgttggtgattggatccaggaaaattcctgctattgaaaaagtttagcaacttaatttaaaagccccagaattgtctgtgaaggggatgcaaactggaacgtgaaaggcaaactctgcatggggggatggatcaatcccatgctgatgtcccacaaaacaaaatagaaatccttttattttttatttatttatttttttgagactgagtcttgctctgtcacccaggctggagtgcagtggtgcgatctcggctcactgcaagctctgcctcctgggttcacgccattttcctgcctcagcctcccaagtagctggaactacaggcgcccgccaccacacccggctaatgttttgtatttttagtagagatggggtttcaccgtgttagacaggatggtctcgatctcctgacctcgtgatctgcctgcctcagcctcccaaagtgctgggattacaggcgtgatccaccgcacctggccctagaaatccttttattttctaatctccatttactccagagagtcaaccttgtacttgtttccaaagactgactttgttttttttttttttttggaaacgtagtttcaaatctgtcagccttggcttcccaaagtgctgggattacaggcgtgagccactgggcctggcctccagagactttcatagacgcaacacctggggtgttaagcatggaaagctaggtctgtcatcaccctggattcatcttgtctctgcccagaagagacagtgcactgaaaacaggagagttttgcagcaaagagtttaattatcgcagggctagccaagtggaacaagttgggagagggggaagttagttctcaaatctgtcgcccgaaaagttgggagactagggttttgaggataattcggagagcaaggggctagggaattggtgtggctcattagttgtggagaaaatcataagagggttcaaaacaggcctcctggagctgagtcagtttctgggtgacggtcacaggaccgggcagtgccagttctctggtaccagtgaagaagacgtccaggtggcctgaatgactctgcccaattgtaaaagtctgaaaaatacctcaaagaccaatcttaggttttcacaatagtagtgttatctacaggagcaactgagaaattacaaatcactggttattgtttctgtctacattttagcagaattcagttacctcccataatcctaacatttagcctttcattagtcttagaaagttggtttcagtcacctgagagggtcactttgggagggactagtatcatcctttcttcaaagtcataactataaactgaattccacccatagttagctgggccaatgcccagtaatgagcaaacacagcttgtgaggttagaagcaacaattaggttagatttctctcactatcatgatttttgcaaaggtggtttcaggttcagtgatgttagatcaccgatttttgctttaaataataagcaatggccgggtgcagtggctcatgcctgtaatcccagcactttgggaggctgaggcaggtgggtcacctgaagtcaggagttcaagaccagcctggccaacatggcaaaaccctgtctctactaaaaatacaaaaagtagccgggtgtggtggtgcatgcctgtaatctcagctacttgggaggctgaggcagaagaatcacttgaacctgggaggcggaggttgcagtgagccaaggttgtgacattgtactccagccttggcgacaagatcgaaacttccttgaagaaaaacaaaacaaaacaaaaacctaaaacatctgatgggagaaagaacgcacaaataataacacaaaacccccaaacaatatgattactgagtgctctaatggtaaggagaaatttaaaccagctggttattaatcttaactttagccaagacagaaccccaaattcacctacatacctaggaatgggtataccatcctaggaggaggaaaaaaactgaaattcaccttcccaattggaagcgagcttaaactttagaaaggagttacctgccttctactgtcatggaagcaggaaaacgtgccttccttattggaagcaagtaaaactccagaaaaagatgtacagcaaaataaagttaagatctcaaccaaattttgatagatcagggattctctagagagggagctcccaggcctcagccaattgtcctactggtttgagccataaggatagctcaatctggtaccaagcaccaataggagatcgtcaaaggtcagggcccactctactcagagttacttccttgggtcaccaatttgtcaacgaagagtacctgagacaggtctcaatcaatttagaaagtttatattgccaaggttaacaacatgcctgtgacacagcctcaggaaatcctgatgacatgtgcccaaggtagtctaagtacagtttggttttacacattttagggagacatgagacattaatcaatatatgaaagatgtgggccaggcgcagtggctcatgcctgtgatcccaacaatttggaggccaaggtgggcggatcacaacgtcaggagttggagaccagcctggccaacatggtgaaagcctgtctgtactaaaaatacaaaaattagcctggtgtggtggcacgtgtctgtaatctcagctactcgggaggctgaggcaggagaattgcttgaacctgagaggtggaggttgcagtgagctgagatagggccattgcactccagcctgggcgacagagtgagactctgtctcaaatttaaaaaataaaataaaatagaaatatatgaaagatgtccatcgacttggtctggaaagtcacacaactcaatcagggaggaagcttctaggtcataggtagataacagacaaactgttgcattcttttggagtttcagattaggctttcactgaattcgtgatttacaggaatagtcacttatgccttagtctggcttagtgaaacaataggacaaaggaaaaaatcagatacgcatttgtctcatgtgagcagagggatgacactgagttctgtctgtcctttgtccacaaggaatttccttgtaggtaaattttgaggaaggtatgtagcttttaaaaatctttgtagctatcttatttaggaataaggaataaaatgggaggcatatttgcctgacagagttcccagcttgacttttcccttggctaagtgattttggggtctgagatttattttcctattacacctccttgtaatatcattataagagaaatgcaaattaatatggatttttttcaaataagttaaagtaggaactactttgtgtgtgtgtgtgtatgtgtgtgtgacagaatctcattctgtcacccagactggagtgcaatggcatgatcattgctcattgcagcctcaggtgatcctcccacctcagcctcctggtagctgagactacaggcatgtaccatcatgcctggctaatttttgtattgcttgtaaagacaggattttgccatgttgcccaggccagtcgcaaactcctggtctcaagtgatcctcccacctcagcctgccaaaatgccaggattacaggcatgaaccacttagcccatccaggaagtactttcatctcttgagtatatattatagcctgtgtcacacacaaaaaagagaatgtacatattctaacacagatggaacaatgaaaatgtttactactgtcaaagaacaaatttggacattggttagaagagattctattcaaaaagtatattgtggtagggagaatgctccaaccacaagatctgcaaatgtttgagtcacaagaaatgggcttttcttttctctaaagaaggaagcaaggctagaaagcaccaggtacagggcaggggatgagcatctgctgtgacctattcagggaattttttttttttttttttttttgagacagaatctcattctgttgcccaggctggagtgcagtggtgcaatctcggctcactgcaagctccgcctcctgggttcacgccatcctcctgcctcagcctcccgagtagctgggactacaggcgcatgccaccacgcccagctaattttttgtatttgtagtagagacagggtttcaccgtgttagccaggatggtttcgatctcctgacctcgtgatctgcccgcctcagcctcccaaagtgctgggattacaggcgtgagccaccacgcccggcccaaacaaagattttaaaaaataataaatacatgtgttctacttgaaaaacagaactaaaagtaataagaacaatagcaaactttgctccttacctcagtttttgaatgacattgaagggtcctcaatgtgcatttcggctgtgtggtattcatttcgatcacatgcaagacactgatcagttcttgttggaagatatggctctacatttctaacttcaagggtctctgtaactgtcgaattaagcagaaagctagggtcatattaagaaaaatagtgttcccttatacatttttctgctgatcatgggaaaacatattctcacagcttcatgaattatttggtcacaatttgacaataaaaacactaatttatatgtcagatccatgtcacattctcatattaatctaaattttcttttttttttttttgagacagagtcttgctgcattgcccaggctggagtgcagtggcgcgatctcggctcactgcaagctccgcctcccaggttcacgccattctcctgcctcagcctcccgagtagctgggactacaggcgcctgccacctcgcccggctaattttttgtatatttagtagagacagggtttcaccgtgttagccaggatggtctcgatctcctgacctcgtgatccacccacattggcctcccaaagtgctgggattacaggcatgcgcccgacctcaatctaaattttcttgacatcctttttggtaccagctgagccctgacaaaggaaggtaattcagagacattttctcttgtgatcagagaaataacctaatgagaataaacttatgttgattgggtttttttgttttttgtttgtttttgagacagggtctcactctgtcccctaggctggagtgcagtggcatgatcacagctcactgtaccctccacctcctgggctcaagccatcctcccagctcagcctcctcaatagctgggactagagggtcacgacactatgcccagctaatttttttgtattttttgtagacatagggttttgtcacgttgcccaggctggtcccaaacttctgaactcaagtgatccgcctgtgtcagcctcccagtgtgttgggattacaggtgtgcaccaccatgcccagctgaaaataaaattaaggtgaagaaagttgttctctgtgatctcaggggaaaaccttcaggtaaatttgcattcagattgaatagaagaaacatacaaatgtggatgaactagatactactttaaaagtctttctagcgccaggctcagtggctcatgcctgtaatcccatcactttaggaggctgaggcaggcagatcatgaggtcaggagatcaaggccatcctggccaaagtggtgaaaccccatctctactaaaaatacaaaaactagctgggcgtggtggcatgtggctataatcccagctactcgggagggtgaggcaggagaatcgcttgaaccagggagctggaggttgcagtgagccgagatcacgccactgcactccagcctgggtgacagagtgagacacctttacaaaaaataaataaataaagtatttctgtccacaaaccagcttggagtaggtaggtagccaggcatgagcagttaaaggagcccctgggaaaggaatcttaagaaacacagcccactgacaatccccttttgacagcaaaagcaggacagtggctacattgcctacacctgtccttgtggctggacttgtctggcccaggaagggagttatctggccctagccagaaataacccagctaggggattttccctattaaggagcgtgcacactcctctaataattcatcctagaatggccttttgctcattataatactaagaaacacatccccttttttcaaatatgattttagaaaaaaataaataagggctgggtgcggtggctcatgcctgtaatcccagcactttgggaggccgaggcaggtggatcacgaggtcaggagatccagaccatcctggctaacacggtgaaatcccgtctctactaaaaatacaaaaaaaaaattagctgggcgtggtggcaggcacctgtggtcccagctactcaggaggctgaggcaggagaatggcgtgaacccgggaggcggagcttgcagtgagccgagatagcgccaccgcactccagcctgggcgacagagtgagactccgtctcaaaaaaaaaaaaaaaaaagccacacccctgggtggagatttgagatgctaaggagatatgtgatgtgtgcatggacagtcacagcacattcctgcccaaatgacttcccagaacatgcttactaataatggctgtgcacggccccttcatgaataatcatgtcaggttctcattaaaagggtcaggccagcataagtaaggacagactccttcttttcaggagcccactcggttctgtcgttcagggtgtcgcttctttctgagctcctgtctctttaaatgaagggcatttaccctttaactctttctgcgcatctcttgactgaatccaagaagaccaagaaccagaggacttccacacccctctgggtaacatctggtgttttcacctggttacctggttacctcgcctggttatccaggtaagtaccaaaaagctggtgccagattctctggttgacgacctctgcttctttctgcactgaagaacctcctgccctaatgcagatctggcagctttaaggggaggggtttttcctctcaggctctgttcactaacgactgcccagtaccatttcccttcagccactgtcactctgctccctctggctgatttctcagctcaccctgaggggtgataagcagaggagggaggatttaaactccacagtgagtagatctgagacacatggtgacccttcttgcaggaggcttgtgaaggtggcagggaatacgcctggctgtgcagtgactggggagcttcatatttttttttgtgggggggaggacagagtctcactctgtcgcccaggctggagcgcagtggtgtgatctcggctcactgcaacctccacctcccgggttcaagcgattcttctgcctcagcctcccgagtagcagggactacaggcgtgtgccaccatgcccggctaatttttgtatttttagtagagacagagtttcaccatattggccaggctggtctcgaactcctgacctcgtgatccgcccacctcggcctcccaaactgctgggattacgggcgtgagccactgcgaccggcgcatatcttttaattaaaactacaatccggtgttaagtcagctcttatacttgccattcatggccgttcactcccctgaacaccatatgcccccaccgttgattaatctcccaggtcactctgcttactctttgctgtccctctcctcgccgcagggatttcatgaattcttcctgcgggtgcaagcctcttgcagggcctgtttatccaggacctgctgcgtttgcttcactcaggcgccagagtcctttgagggcctatgctgatgtttatacttttttcctcagaaatgagactcagctttgtcctttcccttgcctcctgtttcactggagggaccggcactgggaggatgcctgcttaaagaaatccctcattttggccgggcacggtggctcatgcctgtaatctcagcactctgagaggttgaggggggtggatcacctgagggcaggagttcaagaccagcctggccaacatggtgaaaccccatctctactaaatatacaaaaattagccgggcgtggtggcacacgcttgtaatcccagctacttgggaggctgaggcaggagaatcgcttgaacccgggagctggccattgcagtgggccgagatcgcaccattgcactccagcctgggcaacaagagcgaaactctgtctgaaaaaaaaaaagaaagaaagaaatccctcacttattattgggtccttctccgcctgcctactcttcaagaatgcctcattctgtgactcctcaatggaactgcctggctcttccagagggtcacctgtgaccacttccttactccctagtttctctgtacaaccagggtttccaatgggccacaggagactgctttctccacctcattaggccattgtaacagacccgtgaagtactcaggtcctttttgctttttgttgaataagctgatagaaaatgcttctcacattccccttgctgtttatgtgatcatataatggactaaaaaaccagaatcaacagcccagttcactaactctgagccccagggggtcttctatgcttttcaagcatttttttctgtataaaccccaaggaaccttttaagagtgggggaagatatcacatcttttccgttcctgtaatcattagtattagcccaatatcattatgtattaagaagacctaggctgggcgcattggctcacgtttgtaatcccagcactttcggaggccaaggcgggcgtgtcacccgaggttgtgagttcgagaccagcctgatcaacatggagaaaccccgtatcggctgggcacggtggctgatgcctataatcccagcactttgggaggctgaggcgggcagatcacgaggtcgggagtttgagaccagcctggccaatatggtggaaccctgtctctactaaaaaattagccgggcctggtggcatggatctgttatcccagctattcaggcggctgaggcagaagaatctcttgaaccctggacacagaggttgcagtgagctgagatcgtgccactgcactccagcctgggtgacaaagtgagactccatgtcaaaaaaaaaaagaaaccccgtctctactaaaaatacaaaaatagctgggcatggtggtggacaccagtaatcccagctactcaggaggctgaggcagaagaatcgcttgaacccaggaggcggaggttaccgtgagccaagatagcgccactgcactccagcctgggcaacaagagagaaactgtctcaaaaaaaaggactttagaagtcccttctctgcagaattcagcaggggcacaactactgggcttcctgcagaaccaaggtcactgggaacatgagagaagagaagagaactactctcatggcagacattcttccacccgtccttacccaacacggaagagtggaaggcatcactgctgggcatcaatcccaggaaatctaagaaatccttctgagcaaaacaataggaagaaatgcaaacagcagagcacacagtagggctaattccagagctccaaggtgaaggacacttcacccttgcagggagaggcatgagacacctcatttaggtcaaggattggaatgcctgaccttcatgagtcaccaaataggtaaagggacacttcctctatcctgcattctctcttgtcttgtctttcagatgggtaatcagatctttatatcccaggattcccctcctggatccccttggaatctgggaaaaggttgatccccagattgtaaaacaagagactgattttcctttgcaatatagtttggtcaaaggtggggagcttaaatgttaataccatattccagcttgacctttactgccaacaccaacacaaatggtcagaagtcccttatgtgaaaatcttcatgatctcgtgggaaaaccctgatttttgtaaaggctgcaaaacgggctcaaaagaaaaagaaaaggaaaggaaacagccaagggcggtggctcacgcctgtaatcctagcactttgggaggccaaggtgggctgatcacctgtcaggtaaccaggtggccaggtgaccaggctggtcaggagtttgagaccagcctggccaacatggtgaaaccccatctctactaaaaatacaaaaaaattagccgggcatggtggcggtcacctgtaatctcagctactcgagaggctgaggcaggagaatcacttgaaccccaggaggcggaggttgcagtgagctgagatcgcaccattgcactccagcctgggagacaagagcaatactacatctcaaaaaaacaaacaaaaaaaaggccagccacagtggctcatgcctgtaatcccagtactttgagaggctgaagcaggtagatcatctgaggtcaggagttcaagaccagcctgaccaatgtggagaaaccttgtctactaaaaatacaaaattagctgggcatgctggtacatgcctgtaatcccagctactcgggaggcttaggcaggtgaatcacttgaacctgggaggcggaggttgcggtgagccgagatcccgccattgcactccagcctgggcgacaagagcaaaattccatctcaaaaaaaaaaaaaaaaaaaaaaatacaagccattcaggagtttggacaaaaggtactgcctgctcttgaccctttcaggaatcaacacccattataccaaccagggtcaaaaaacctggagagatgggtcatctgggtctcaactcccttatggaaagacccctttactgtcttactttccaccccaacagctatcaacatttctggcatctccagttggatacatcagtctcaagtgaaactgtgggaaggtcccgaagaaccacagaagaacaacagaattcagcacctgagcattcttgtgagccactggagaacttaaaattccacttcaagtgaaaagataagtaaagccttctctctgttcacccaaaactaaagtcaatctcagtacggggaatcttggttgcggtggcattggttcttctccttattttgacccaactggcatgccacctgaagtcccgataacagcctgatttctcactaaacactccatcgaaccacttcattatttgtctctcctattttcagcactttccttttgctttcacaaagcttaagggagaatcagctatgacagagaaattccttttcctttatctttccctccttcccatgcccctactctcacaggcacagtggaatgaaaattcccttgtcagtttttccaaaataattgcttcgggaaaccatctaagcaactgttggatctgccacaacttcatcaccaggtcctcatcttaccaatatattttggtaagaaatttttctttaaacctaacatttggttcaggaatccctgaaggccaacataaatctgttccgctccaggtttcgcttgctaactcagcgcaccaagtcccctgcctggatctcactccacctttcaatcaaagctctaaaacttctttctatttctacaactgctcttctctaaaccaaacctgttgtccatgccctgaaggacactgtgacaggaagaacacctctgaggagggattccccagtcccaccatccatcccatgagcttctccccagcaggctgccaccctaacttgactcactggtgtccagctaaacaaatgaacgattatcgagacaagtcaccccaaaaccgctgtgcagcttgggaaggaaaagagctaatcacatggagggttctatattcgcttcccaaggcacacactgtccccacatggccaaaatctactgttcccctgggagggcctctatcccctgcatgcaatcaaactattccagcagggtggaaatcgcagttacacaagtggttcgacagccacatcccccggtgggcctgtacccctcctggctatgtatttttatgtgggccacaaaaaaataaactgccctttgatggaagtcctaagataacctattcaaccccccctgtggcaaacctctacacttgcattaataacatccaacatacgggagaatgtgctgtgggacttttgggaccacgggggataggtgtgaccatttataacaccacccaacccagacagaaaagagctctgggtctaatactggcagggatgggtgcggccataggaatgatcgccccatggggagggttcacttatcatgatgtcaccctcagaaatctctccagacaaatagacaacatagctaagagtaccagagatagcatctctaaactcaaggcctccatagattctctagcaaatgtagtcatggacaacagattggccttagattacctcttagcagagcagggtggagtctgtgcagtgatcaataaatcctgttgcgtttatgtcaataacagtggggcgatagaggaggatataaaaaagatctatgatgaggctacgtggctccatgactttggaaaaggaggtgcttcagcaagggccatctgggaggctgtgaagtctgccctcccctccctcaactggtttgtccctttactgggaccagcaacagttatactcttacttttcctctttggcccttgtttctttaatttactgattaagtgtgtctcttctaggataaagcaatttcacatgaagtccccccaaatggaaagatatcagctatctgtcattggaggccccagcacctataagcacatctcccccttggatgccagtgggcaaagattccgggaaactatggaggaattttctctctgagacagagcaagagagggagaccctgatgacttcttcgccccatgtcagcaggaagtagttacagaagacccacgacgtccttacaaccagagcttttcagggtctccatctcttgaggagggaaatattagggtaggcaggtaggcaggcatgagcaggcaagagagcccttgggaaaggaatctttagaaacgcagcccactgatagcttccttggtgatgctgcccacagacagtcagcacttctctaataacccatcctagaacagccttttgcttttttttttttttttttttttttttttgagacaagttcttgctctgtctcccaggctggagtacaatggtgcgatctcggctcactgcaccctccacctcccaggttcaattgattctcctgtttcagcctcctcagtagctgggactacaggcatgtgccgccatgcccggctaattttgtatttttagtagagatggggtttcaccatgttggtcaggctagtctcaaactcctgacttcaggtgattcgctcgcctcggcctcctaaagtgctgggattatagacgtgagccactgcgcctggctactcagaacgcttctgaatggcacattcatgaaaaatcatgtaaggttctcataaaaacatctgcccagccattagtaggagtagacacgtccttttgatcagcccgccctgttctgtctttctgggtgtactgttttgatgactttaaaagctcccataaaaactaaggcactagcagctggctcattcttctgatgtcctctctttttaaataaagcttacttaaccctttaactctttctgtgtgtctcctgactgaattccttccttgaggaagaccaagaactgaaggattccccacccctcgtggtaaccaaaggtctatgaaggatttagtgcatctaaactagtaaatacaggctgggcgtggtggctcacacctgtaatcccagcaccttgggaggctaaggcaggtggatcacctgaggtcaggagttcgagaccagcctggccaaaatggtgaaaccccgtctctattaaaaatacatatattagccaaacgtggtggcgggcacctgtaatctcagctactctagggggtgaggcaggagaattgcatgaacccgggagatggaggttgcagtgagctgagattgcaccactatactccagcctgggcaacagagcaagactccatctcaaataaataaataaataaataaatagctaaataaataaactagtaaatacaaactgcactcaactgtccaagaaatattctttatttcttaaacgttgggaaaatataattaaaggcaaaataattttctcctcacccagaaatcctctccacaaaggaaaacaataaattgataatcccagcccagttagtggttggtgaatgcctctaccttaatcaatacatgtttcgaagcagtcagcatctattttctcatgaaagatgactccagagaacctggtctttgctttgcctggtaggtgaggaataccttaatcttatcagaaatatataaattggtcgggtgcggtagctcatgcctgtaatcccagcactttggaagtctgaggtgggtggatcacgaggtcaggagattgagaccatcctggctaacacggtgaaaccccgtctctactaaaaatgcaaaaaattagccgggcacagtggcgagtgcctgtagtcccagctactcaggaggctgaggcaggagaatggcgtgaaactgggaggcagaacttgcagtgagctgagattgcgccactgcactccagcctgggcgacagagcaagactctgtctcaaaaaaaaaaaaaaaaaaaaaaagaaatatataaattatgtggtttttcacaatatttactaaatttctcaactcacccactgtgaagacagcacaatttgaaagggacaccactcccttgtaatggaacacaaactcagcttctgctccgtaacaataaatagtaatagcaatactaaatgaaatattaagtagtttcatgtaagtatgtatacaattgatagtttgttattattttcagttttgcaattggtacaaattccatagaataattttccttctttctttttttgagactgagtttcgctcttgttgcccaggctggagtgcaatggcgtgatctcggctcaccacaacctccgcctcccaggttcaagcaattctccttcctcagcctcccgagtagctgggattacaggcatttgccaccacgcctggctaattttgtatttttttagtagagatggggtttctccatgttggtcaggctggtcttgaactcccaacctcaggtgatctgcccgcctcggcctcccaaagtgctgggattacaggcgtgagccaccgcacccagcctgaaaagttttttctgcagctattgagataatcatgggggttttgtccttagttctgttcatgtgatgaatcacatttattgatttgcgtaggttgaaccaaccttgcatgtcagggatgatatccttgatgaacactgatacaaaaatcctcaaccaaatactagcaaactgaatatagcagcgcatcaaaaagcttacccaacatgatcaagtaggctttattggcatatatatgccaataaagtaagataatgcagaatgaataaatctctagaaatatataacttactgccaggcgcagtggctcacgcctgtaatcccagtactttgggaggctgaggcgggtggatcacaagatcaggagttcaagaccagcctgacgaacatggtgaaaccccgtctctactaaaaatacaaaaattagacagggatggtggtgcgtgcctgtaatcccagcaacttaggaggctgaggcaagagaattgcttgaacctggaaggcagaggttgtagtgagccgagatcacgccattgcattccagcgtgggcgacagagtggtactttgtctcaaaaaaagaaaagaaaaagaaaaagaaaaaaaaaagaaatatataacttaccatcactgaatcaaaaataaattgtaaaaatctgtacatgcctataaataacactaaagtagtaatgaaaatgtcccaacaaaagagaccaagtatagacacgtaatttgtaatcactgcataattctactgaacatttaataacaaattaacactgagaacaatggttctccgctgcgacgagcaggaggaaggaaagctgaacagaaacatcttggtgcctaagccgtatgttgggggtttactataaaacaaatacattaatcatgtgatgtttaaataagtcgaatatttaataattactgggttaaaaaatggttccatcctctccgatggcaaagaagttctgatcctctgtctgagaacaatgataaccattttcaccaaaaacacatttcacaggcgctcctccaggaatacacagactgtggtctgtgttctggactatctgcaaatagtttaacatttgctgtttgacatttacatggacttcatatcttaaaatgggtaatgagatgaaagcatcttatcactgatgtctgtgtctcagctttccattccattcccagtcatgaagaatttggagtcagaagaccaggcgcggtggctcacgcctgtaatcccagcactttgggaggccgaggcaggcaaatcacgaggtcagaagattgagaccatcctggctagcacggtgaaaccccgtctctactaaaaatacaaaaaattagccaggcgtggtggcgggcacctgtaatcccagctactcgggaggctgaggcaggagaatggcgtgaacctgggaggcggagcttgcagtgagccaagatcgagccactgcactccaggctgggtgacagagcgagactccgtctcaaaaaaataaaaataaaaataaaaaagaatttggaatcagaaacacagtgactcacttgtagagtttcaaacataacataaacgaggcaggaatgctttccccttagtgttctaattttaaagcatttagcaggaacttgtgcacagtaatatttgacttcatgggcagtttcttgaatcctgttctgcaaagaggtggcatgcatccagatgtggcccctaaacaatccctgctgcccagcatacaacccacacaaatatacgacaagaaaacaaaaccttagaccaatatccctgaaaatattggtgaaaaagtcctcaacataatattagggggcccacaccccatctccaatccaggccccagtggagcttcttcccaagttcatgtcactaggtcacgggcaatggaatgtaagtgagataagagggactgagggaccgcatgggtgagtgagcaaatatgtcaggcaggatgcttcagactcaaagacttgcaactccaaagaatgacattttgttattgtaggtaactcctctggtatgagcagagcagggcagggcaggagagggctccccctccccatacacacacatcaggaatgtcaggcaactatcagatgatggtcaggtggttgttaaacatgtaaaataatagtcacagctggcaccagggaaaggcaggctcctcacacacagaaaacacctgaaactggtgatctgctgcttcccatgagatctcaggagttgggcgagtggactcaagcacgcacatgcggacagcccaccccaagggaagaatcagggaagcaagaccccggaagtataccaatgtataaaaccccaagtcaaaaggtcgaagtgcacacttgcctttcaagtcacccacttggcacttggccgtcttccaactgtactttccttcctttcatttctgctctaaagctttttttcttttcttttcttttctttttttttttttttttttttgagacaaggccttgctgtgtcactcaggctggagtgcgatgacatcatcttggctcactgccaacctccacatcctgggctcaaaagattctcctgcctcagcctcccaagtagctgggattacagccatgcaccaccacacccggctaatttttatcttttttgtagagatggggttttgccatgttgcccaggctggttttgaactgctggactcaagtgatacgcccatctcagcctaccaaagcattgagattacaggtgtgagccactgcgcctggccatttctgctctaaaactttttattcattcattcattcattcattcattcatttatttttgagacggagttttgctcttgttgcctaggctggagtgaaatggcgccatctcggctcactacaacctccgcctcccacgttcaagcgattcttctgtctcagcctcaggtcaggctgatctcgaactcgagacctcaagtgatctgccgcctcaggtcaggctggtctcggactctcgacctcacatgatctgccgccttggcctcccaaagtgctaggattataggcatgagacaccgcgcccggccctgctctaaaactttttaataaacttttgctttcattcctgctctaaaacttgcctcagtctctccttctgccctatgcccctcagttgaattttttcttctgaggaggcaagaattgaggttggtgcagacctgtacggatagggattcaccacctgtaacaatttcagaaataagagaaataaaaatcaaccgatactattactttacctgagtaagagccatccctgtttccttttcttcctcttctaggcatcttccttgggtaacatgaaaaagcctttacaagtcgatcctgaatgtctaaaatatgccatttaatgactggaatcaacaccctcatttttgtgcctcaaacacccattcagggaagccctcactgtggaaagccagttctctgggagtcattgcaccagatggaacacagggacgacaggctcctacaggaagaccaacaggtgagttttgggcccatttcttcagaacccgctcccctcccagagaagcccacacacacactgcagccgtgggaagctgggctggactgagcttctcttcaggacacagacccagccctgaccaaaccccatgcagagcacagcccccctcacccatctgtggatcacaggctgatttcagcccttagaaacaaagggcggagcctgggtgctcaatgctggacacccatggaatcacctttaaatattattaaggacacgtcccaatgtatttgaatgaaaacttcaggtaagggggcaccagaggtgtgcctgcaaaatgccccagatgcctgctggactcccagaggagagttgaagagacaattggacacaggattccagtgttcaggggagaggtctgcagggaacatggagccgtgtaggtgggtttaaagccatgagatgagatgataagggcagtgggtgtgggcagagatcagaagtccgaggggtaagctgagggtcactccacattcagaaaacagagctcaagacatactagaagagaaaagtgtaaagtgatcagggaggcaagaagaaaattaagagaaatacatttttattttttttaattaaaaacatttttgacgtggagtcttgctctctcgcccaggctggagtgcagtggcgcgatctccgatgactgcaacctccctctctcgggatcaagcgatttgcctgcctcaccctcagagtagctgagattacaggcgtgcagcaccacatccggctaatttttagtagagacgggggtttcaccatgttgggcacgctggtctcgaactcctgacctcaaatgatccacccgcctcggcctcccaaagtgctgggattacaggcgtgagccaccgcgcctggatccttctttcgctcttcccgtctctgcgaatcccgacccatcctctactttgccatgtgtttatgggtttccttcattctttcctctcagtttttgtaattcactctcagcccctctctgtttcctgatccctttggcccacacattcacaggagggtttggagtaagacacctggatcctggaggagcacattttccagcgggtggagctgggcaggcaagaacaccgggtgtcacaggacaggccccgggcacctccccaacgcgggcgcaggggaagcggtgactgcgaaggggaggcctggggagcagcagggcccggcacgaggaggagggaggtggggggcgacggcgccttaggacagggtagggtctgcaggagcctaggaccaggcggaggacgcggtctgcggcgctgcgctccagggccgacgacggagaggctgggaggcgctcaggacgggaatccacctcgcaggtgaggactttaaaaagcgcggggcgggaggaggggtcaggaaagggttttatgcgggaagaagacgcgaatggcaggggacagggactggtctcagagcgagttttacccacatggcgaggtccgtatttacctcgggtgaagggcgcgatgcggggattttaaggtcagcagagcgggtgtggaaaagcgggacggcgaatcgaaggcttaatctacacctaggcacactcttgctcggcggtgtcaccttcacacaccgcgatccgcttccgggactccaagaaactgcacgtgcgcgcagagcccgggtagcctggggcggagcccggggagaggcggggtctgcagagggaccgcgggggcggggcctgtgcagttgtaaggtaaaaagcatagagttgtgtgggccccttctgttggaaagcaaaatgttttcttcccaccaagatgaaaacggtttatctcaaaactatttttgccagcaggttggacccgatcctgctagggagtctcctgcagctcagcggtctgggaactgcgaattcggtggggggaggggggtccaggaggagcagtgagtgattggatccaggaaagttcctgcaattcaaattaattggagtaacttactttaaaagccctgaaattatctgtgaaggggttgcaaactagactgtgaaatgcaaaactgcccggaacaaatgtgatacgtaatgctattgcccaaaggatcctcctttccatttctatcccatacctatctcaggggaagagtcaagtctgtgcttccagagacttttataggacaacacctggaccgtgggctgtggaccgtggaaggctaaaacccgcagtaagccagatcaccaactgctgctttaaaacacgcaataacttttaaaaaaaaatagatatgaattgtattgttcttccttatacttgttattcggttccacggttgacaaaacctcaaataactttgagataaactttttttttttttttttgagatggagtctcgctctgtcccccaggctcctggaatacaatggcgcgatctcggttcactgcaacctctgcctcccaagctcaagcgattctcctgcctcagcctctggactagctgggattacaggcgcgtgccaccacgcccggctaatttttgtttttagtggagacggggtttcactatgttggccaagctggtctcaaactcctgacctcaagtgatgcgcccacctcggcctcccaaagtgctgggatgacaggcatcagccaaggagcccggccgagataaactttctttaaatcatactatgcttaaatcgataatatctaaactttttttttttttttttttttgagattgagtttcgctgttgttgcccaggctggagtgcaatggcgcgatctcggctcactgcaacctccgccccccgggttcaagcgattctcctgcctcagcctcccgagtagctgaccaccacacctggctattttgtatttttagtagagacagggtttctccatgttggacaggctggtctggaacccccaacttcaggtgttccacccgcctcagccttccaaagtgctgggattacaggcgtaagtcactgcgcccggcactttttttttttttttctttttaagattaggaaacagacgtcagaagcagccaaatcaggtctgtaaggtggatgcctaatgatttctcattgcaacccactgttgcaaaactgccgttgtttaattagaggaatgaccaggaacattgtcatggtggagagggacgctggtgaagtttccctggacatttttctgctaaagctttgggtaactttctcaaaaatgctctaaaaataaataagtgttattctatgtccctctagaaagtcgacaagcaaaatgccttgtgcatcccccaccgccaaaaaaaaaaaaaaaaaaaaaaaaaaaaactattgccatgaactttgttcttcaccgctcagcttattttaattaattaattattgagaaagagtctcactctgttgcccaggctggagtgcagtggcgcaatcatggtgcaccacaacttttacctcctgggcttaagtgatcctcctacctcagcctctcaagtagctggaaccacaggcacacaacaccatgcctggctaattgttttataattttttgtagatacagagtctccttatgttacctaggctggtcttgaactcctaggctcaagcaatcattctgcctccatctcccagaatgctgggattacaggtgtgtgccacagagccaaggttcactggtcagccttttgctttgactggactatttccacctcttggtaaccattgctttgattgtggttttttcagcattgtactggtaaagccatgtttcgtcttctgttaaaattctcctaagctacctggagttcacacagctgcactattcctttatttttttattattattattttttgagacaaaggttcactctgttgcccaggctgaagtgcacttgtgcaatctcggctcactgcaacctccacctctttggttcaagtgattctcctgcctcagcgtcccaagtagctgggattacaggcatgtgccacaacgcccggctaattttttttgtatttagtagagacggggtttcatcatgttggtcaggctggtctcgaactcctggcctcaaatgatccacctgccttggcctcccaaattgctgggattacaggcatgagccacctcacccggccctgtaccgttccatagaaagagcttgtgtatggccgggtatgttggctcatgcttgtaatcccagcacttcgggaggccaaggcagatggattacttgagctcaggagttcaagaccagcctgggcaacatgatgaaaccccatctctaccaaaaaaaaaaaagaaaaaaaaaaaaaagaggaggaaaaaataaagagctcatgtagaccaggtgcagtggctcacacctgtccaccatttcccaactgagctactgcagctccctacctcctgggagcaagctacctaggagacactccatcacccccttccctgttttggctgggccacacccctggctacttaaagcccgaaaacacagtgcgtgaatcaacctcgttgggttttggacatgtaagttacctgagctacccaccacatatatacctcttcaacgtaactccttgcttgctgttggacactggtgggaacggtgcatcttatagccagagctctgtgtcaccctgtaacatgaactgcccattctcactcgggtgctcacaaaccttatcgataaaattggacaggctcaatagagctcaactataaaatggaactggcatattcaagatgaggcacagcagaacctcaagggaccagtatactccatgaacaaatgggtagcttacaagaaggggtcaaacagtccttaaaggatcctctggctcctcttgtggctacctgggacccaagattcacatatatgcccaccaagtgtatggcatggtttactgatgtctctgcaaaacaataaacacacagggtctactgggcttcagcccagtggatggccattctttgacccagtgaatggccattcagccagtggatggccattcttgactaagactagacatagacattctgcctaattagccaaactgcatgcattggtaatggccctgcaggccacgtccaccaccatatctcatcacattttcatgactcatgagccatgcagacttgtgtggaaccctttaatgctgcaggacagccaggggctcctttggttcacccaatcttcgaaactgttgtattaagacctttgtttcaacttcatcaatttccatttccattttactcatcccgttttttttttttttttttttgagacaggctctcgctctctcacccaggttggagtgcagttgtccaatcactgctcactgcagcctcaaactcctgggctcaagtgatcctcccatcctggcctcctgagttagctgggcccacagaagttcaccaccacacctgactaatttttgtatttttttgtaaaacagggtttcgccatgttgcccaggctggtcatcccatttcttaattaccatctaaagatttccactctgctgggaggagagccatgactctcccctacctttccccgcttagtttcattttatgaatgcttttttttttttttgagacggagtctcgctctgtcgcccagactggaggagtgcagtggcacgatcttggctcactgcaagctccccattccaggttcaagccattctcctgcctcagcctccagagtagctgggattacaggtgtgcgccaccacacccagctaattgttttgtatttttagtagagacagggtttcactgtgtaggccaagctggtctcgacctcctgacctcaagggatccacccgcctcggcctcccaaagtgctgggattgcaggtgtgagtcaccatacccagcctgtgaatgcttgctttattcaccttttttcttaatgacgattttaaaatttccaccttcatgaggagaagtcctttgaatctcaactattttcccccatccattctcttcttaattaacttgatactgttaattggcacttgaaagttccaacaggagatgtggagacagcaaatttgataaggcttcctgagctgtcttttggttttgtagaagtaaggtaccgtgggatgtatacattaaaggaacaaccttatttttctccccttccttgcttgtagttctcaagaataacttcagaatgttattctgaaggtaacaccctgaaatatgaagaaactggccaaagcagccgggctccattccagagccccctgcccccctttcaaagaacaggatgtccttcagtgctttagggcggctcatcacgaggccatgtgccataaaacctagggtgggtgctctctggggtccctcagcatcagtgccggtgggacaccagtagatgagactccatcttccccaagcagttttcctgagccttgggggaccagcttgcaatgaatcagtcctaggcttctactgccccttgttgcctgtcagtagtcaactcactttattgaacttgtgtgcatgggttctgtctcactggagtcagacattcggtaaccagtgcgaagtgaacctacttcacaggcaaggagagtctgtaatcctcctacgcttggcagtgggaatgcacaatggcacacccactatggaaaacagtatgttggaaaacttcctcaatatggtgcctacaaaaccttacagcaaacatcatatatcatggtcaaaaagtgaaagtttccttcccagggttggggacaaggcaaagacgtacactcttaccacttctattccacatagtgttagcaattcttggctgagggtagtggctcatgtctgtaatcccaacactttgggaggctgaggcaggaggactgattgagtccaggaatttgagaccagactgggcaagatggggagaccctatctatctctacaaaaaaaaaaaattgaaaattggctggtggctgggcgaggtggctcacgcctgtaatttaagcactttggaaagctgaggcaggaggatcccttgaacccaaatgttcaagactgcagtaaggtctgactgcaccactgcactccagcctgggtaacaaagcaagaccccatctagaaaataataatactagtaattgaaataagaaaaataatagagaccaaaaaggaaggcataatactgtacacgatgagatggttgtggtaagctaatgacccccacccccaaagatacacacacaaaggatttccgtatcaatagccctataccctgtattacatggtatctcaaatcagagtttgcagatgtgatctggctgaggatcttgagatggcagaatatccaggattatctggttgaagcaacataatcacaagagtccatataggaaaaatacagatggacttagaatcacagagaattgacaatgcttgcatagcaaagagacaaagagattttatgacactaccttctggctgtgaaaacggagggacgtagaccatgaggtaaaggatctaagtggcctctggacctagcaggggtaaagaaataaactctcccctagagagtcaagaaggatcatagttctgtaaacctgacttctgaccaccacacattaacagcataaatttgtgggtttttttttttttttttttttgagacagagtcttgctctgtcgcccagactagagtgcggtggcatgaacttggctcactgaaacctccgcctcaagcaattctccagcctcagcctcctgagtagctgggattacaggcacgcgccaccgcacccagctaatttctgtagttttagtagagatggggtttcgccatcttggccaggctggtctcaaactcctgacctcatgatccacctgcctcggcctcccaaagtactgggattacaggcgtgagccaccatgcccagcctaaatttgtgttgttttaagccactcactttgtggtaattgttacagcagcaatgggaaattaagtttatgtagaaaaccctaagaaatctaaaaaatctggagaacgagattttaaggaaatagactaccaaattaacatacaaaaactactttatttctatatactagcaattaatacatggaaattgaaaataaaatacaatactcctctggtttgaatatccccaacaaaactcatttggaaacttgatccccggtgtggccatattgagaagtggggcctttaagaggtcattggatcatgagagctctgctgtcatgaatgaatcaatccatgcacagattaatggactgtgttatcatgggagcagaagtggtggttttataggaagaagagagacctgagcaaacagcatactcagtgctctcacaatgatgtgctacattgcttcaggatgctgcagagtgtccaccaagaaaccctaaccagcactgaccaaaggtcaaaaaatgtctagtaaggagacctttatttcttacacagggttgcagcctgcaggctgggaagcatggtctctaccagaaacaacacaggcagttcagaggaggaaagttgcggcaggaatttatactgaatagcaatatgttggatattaagtaaacatactcaataggttatgggagagtcatgcgtgtgtgataagcaaacatacatgttcctagtttatctaccagaacaaaataaaattctcattttctatattcactcttaagaggaaactcatgaacattaatcttttcaaattatatcaatattccaagaacatcatgaaggaggttttattattctccactttttttttttttttttttgagatggagttttgctcttgttgcccaggctggagtgcgatggcgtgatctcagctcactgcagcctccaccacctgggttcaagccattctcctgcctcagcctcccaagtagctgggatttacaggcatgcaccaccacacccagctaatgtttttgcatttttagtagagacagggtttcaccatgttggccagtctggtcttgaactcctgaccttaagtaatccacctgcctcagcctcccaaattgttgggattacaggcgtgagccaccatgcccagccaacgttttttttttttttgttttgttttttgagaacgagtttcgttcctggtgcccaggctggagtgtaatggaatgatctccattaatagaacctctgcctcttggattcaagcaattctcctgcctcagcctcccaagtagctgagactacaggcatgcaccactaagcccagctaagtttgtatttttagtagagatggggtttcactatgctggccaggctggtctctcctgacttcaggtgatctgcttgccttggcctcccaaagtactgggattacaggtgtgagccaccgtgcctggcctgatttatatttctcgcattcttactatgtattttcacttcatggaaaccaagatgcaaagcatgggtcttatttggcacacaagaaactgatgtggaaatataataatgtggtgcatatgcatcaatggcaatgcagattttggggtgtaagaatgtgaaattaactttcagtaagattttcattataccccaataagtatcctaagccacagtgtggggcacgtaattcaagcacaaaatgcggttataggtttccaaaactgcgttatttgatttcaccatgaaaaaaattgttcttgatcgtttaagagcctagtggtgtactgctattgtgttatggagtatcctactgagacaggataaaactatgttggcagaaagaatgtgattcattcatagagaaaaaccattctattttattagttaaaacattatatctatgatacattctgaataaaacattagcaaaatgtgcttcaagcagataatgtgagttctactaaagaatatgttactctacttctgttgattaaactcttcactctgacaactactctctcttcagtttttctttttcttctttagatggagttttgttcttgttgcccaggctggagtgcagtggcatgatcttggctcaccacaacctccgcctcctgggttcaagcactctcctgcctcagcctcccaagtagctgggattacaggcacctgccaccacgcccggctaattttgtatttttagtacaattggggtttctccatgttggtcaggctggtctcgaactcccgacctcaggtgatccacctgcctcagcctcccaaagtgctgggattacaggtgtgagccaccgcgcctggcctctctcttcaatttcaaaacaagatcaatttttcatcactctttgctaaacaacaggtattgctctttgatgcataagagggcgaccttttcccctgcagtatttctaccacacaatcagtgtctaattacctattactctcctcccacaaaaatcccaatgtcctaaggtcttggcctgctccatttcatgttcagttgatagaccatttctttcctctaagccacagtactctcctggtaggagaaaggcaccctgaacattatcagaatggtgagtgacatcatagttttacattgtttttcgccactcccaaatgctaattcagatgatacttaattttaaaagcaaagtcctccttcttcacaaattggatagaaataatccttcacctaatcaatgatcttcacccaatcaatgatccttccatcccaatgatctttccaagaaagcaccatggaaggtgtgtaaggatgcacaataagatttcaaagttcacattgaaacgcaatagtaggctttccaaaaaacctcaaataactcagtgaaacatttcataaggtgaaggtaactgactgcctacaaatatcctgcaaccttttcgtatgtgagttaaaaatatataatttttagcatatttggacttgtgagtattctacagtgtataatatcaaaggcaaacagggaaaccagagactgttattcctcctaggaatcctcacttaccatcggtcactgggtaatggcctcaggatgcatattacatttgtttcgtttcatcaaagatataaatcttgatgcctagtaacctgcgaggcctggatagaccctctgccacatatgtttacatgatgtctcttgcttatggcctctcatatctattaatgcttcaactcatgagggattggccactgtcactacatttgtaaggattctgtcaagaatgaaattaactgatgtgaaaggagtgaattgtacctaatgacctcaccacactcatttgtaaggtttctctccggtatgcattctgtgatgacttgcaagatttgaactctgcctgaagaccttgccacactcattacatttgtaacgcttttctccagtgtggattgccatatgggtagttagacttgatcttaccctaaaggctttcccacactctgtacacctgtaaggtttctccccagtatgaattcttcggtgatttgccaggtgagcattttgagtaaagaccttgccacattcattacatttgtaaggttttttcccagtatggattgcctgatgggtggttaggcttgaacgaacactgaaggctttcccacactcattgcatcggtaaggtttctctccggtgtgagtcctttgatgatttgcaaggtgtgagttctgagtgaagaccttgccacattgattacatttgtaaggcttctctccagtatggatgaccttatgggtagttaggtttgaatgcatactaaaggctttcccacactcattacacttgtaaggtttctctccagtatgaattcgccgatgagttgcaaggtatgaattgtgcctaaaaaccttgccgcattcatgacatttgtaaggtttctctccagtatgtattgcctgatgaaaagttaggcttgaacgatcactaaaggctctgccacagtcattacacttgtaaggtttttctccagtatgaactctccaatgccttgcaagttgtgatgtttgagcgaagactttaccacattcattacacttgtaaggtttctctccagaatgaattccccgatgacttctaaggtgtgatttttgagtgaagctcttgccacattcaatacatttgtaaggtttctctccagaatggattgcctgatgggtagtcagacttgaacgaacactgaaggctttcccacactcattacacttgtaaggtttctctccagtatgaattcttcgatgatttgcaagttgtgaattttgagtgaaaaccttgctgcattcattgcatttgaaaggttttgttccagtatggatgacctgatgggtagctaggtttgaatgcatactgaaggctttgccacattcattacacttgtaaggtttctcaccagtatgaactctccgatgccttccgaggtatgaattgtacctaaagactttgccacattcattacatttgtaaggtttttctccagtgtggattgtctgatggattgctaggcttgaacgaacactaaaggctttgccgcactcattgcacttgtaaggtttctctccagtgtgaattctccaatgacttataaggtgtgaattttgagtgaagagcttgccacattcattacatttgaacggtttttctccagtatgaattaactgatgggtagttaggtttgaatgtcctctaaaggcttttccacactcattacacttgtaaggtttctctccagtatgaattcgccgatgagttgcaaggtatgaattgtgcctgaagaccttgccacactcatgacatttgtaaggtttttctccagtatggatgacctgatgaatagttagatttgaacgaacagtaaaggttttgccgcactcactgcatttgtaaggcttctctccactatgaattctcctatgacttgtaaggttcgaattctgagtgaacgccttgccacattcattacatttataaggttttccacaactgtttgcttttcgtctttgtgtgagtaatgaaaaatggttaagttcatgatattttttagacctgtgggtttggacactagaaggaatttgttgaagtggtgacactgaggaaccattgttggtagacttctcaacttgattacattcatacattttcccctcaccttgaaatagctgcagttcaggcagatgagaatgaaagcttactccaagctgattgttcataagcttgttttctatgtctcttctgtcgcgttgatctcttttaccttctttctgggccataagcactcccttgtaatttcctgtgtcatctctccattgacactcaaaatcatgcacatttttctggggttccttgaaggaaaagtcttcaatgtcagggctttcgtgtctttccaacaccactgtgtggaatactgcttctgtactgctcttctcttttggtagcaaatccttgattgtacatttaggagggatatctacaagatataaagaaccacataatttccaattaattacagtatagaaataaatattttacattgaaaacatattccaccaaaagtaatacttatattgaacagactttggaacttcagaactgtgaatttcaattgttaggaacaaaaatgtttttttttttttgagacggagtctcgctctgtcgcccaggctggagtgcagtggtgtgatcttggctcactgcaagctctgcctcccgggttcacaccattctcccgcctcagcctcctgagtagctgggactacaggcgcccgccaccacgcctggctaattttgtttttgtatttttagtagagacggggtttcaccatgttagccaggatggtctcgatctcttgacctcatgagccgcctgcctcggcctcccaaagtgctggaattacaggcgtgagtcactgtgcccagccaaaagtagtattttttaacaaagaaaatgcagttacatgtaattcaaatatttgggaagggctggctgttgtggctcatgcctgtaatcccaatgctttgggagcctaaggtgggaggatcacaggaggccacgaggttgagaccagcctgggcaacacagcaagactccatctctacaaaaacaaaataatttaaaaattaggccaggtgtggtggcttatgcctgtaatcccagcactttgggaggctaaggtgggtggatcatgaggtcaggagattgagtccagcttggccaacatggtgaaaccccatctctactaaaaatacaaaaattagtcaggcgtggtggcatgcgcctatagtcccagcttctcaggaggctgaggcaggagaattgcttgaacctgggaggcagaggttgcagtgagccgagatcgtgccactgcactccaacctgggcgacaaagcaagactccgtcaaaaaataaaaataaaaaaattagtttggcatgctggcatgtgcctgcaattctggatactcaagaggctgagggtgctgggtgcggtggctcacacctgtaatcccaacactttgggaggccgaggcgggtggatcacctgaggtcaggagttcgagaccagcctggtcaacatggcaaaactctgtctctgctaaaaatataaaaaattggctgggtgtggtaatgggcacctgtaatcccagcaacttgggaagctgaggaaggagaattgcttgaactcaggaggtgaggttgcgccactgcactccagcctggggcaacaagagcaaaactccgtctcatcaaaaaaaaaaaaaaaaaaaaggctgaggcatgaggattgccttagcccaagagttcaaggttacagtgagctatgattgtaccactgcactacagccttagagacagtgagatgtcttaaaaaataaaaaaataaaaaaaaaatcgggcagcctagattcaaactacctatgaccaaaacactcacgttgtgaatcctatgttagccatcagaggattatttttccacgctgacctcacggcacataccaattggccaaaaacatatggctatctcaattgaagaaaaataagttatacacatttaaagcatattcattatgtacaaatacatactaaagtacaacataatatattataatggcaaagagctcacaggaaacataattaagaagcgggaattttgaactgcaaaaccatcatagcactaggaaaatgaacattcaataaaactatgtcagaaaaaaatgtgttgaaatacttgttatataactatctatatccacacagagcagataattttgcagcattagtaagtggtacatgacagttatatttctttctttctttttttttttttttagacagagtcttgctctgctccccaggctggagtgtagtgctgcgatcttggcttgctgcaacccccgcctccagggttcaagtgattctcctgcctcagtctcccgaatagctgggactgcaggcatgtgccatcatgcctggctaatttttgtatttttagtaaagacaggatttcaccatgttggtcgggccggtctcgaactcctgaccttgttatctgcctgcctctgcctccccaagtgctgggattataggcgtgagcctctatacctggcctgacagttatatttcacaatacctgctgaaaaccataatgtattcattttatgaaaatcaactaataagatattctagcagcctatgataaaatgaattgagaggaataactgcatatataaaatgttcttgtttaaggccatgtgtggaaacttaaaaaaaaaattattggccaggtgcagtggctcatgtctgtaatcccagcactttgggaggctgcagcaggtggatcacctgaagtcgagagttcgagaccagcctgaccaacatggagaaacccgatctctactaaaaatacacaattaaccaggcatggtggcgcatgcctgtaatcccagctactcgggaggctgagacaggagaatctctcgaacccaggaggcagaagttgcggtgagccgagatcgcaccattgcactccagcctgggcaacaagagcgaaacttcatttaaaaaaaaaattattgtccgtggaataataaacagttttgtcttaagagaaagaagcatttttatttagaaccaacacaataagaactggaatatgatttttaaaaaaattctatattgacaaattatagttatatatatttacaggaaacaaactgatattctgttataggtatacaatatggactgatggaaacaagcctattaccatataagtcatctcaaaaacctatcatttactcctaatgttttcacccagtgaccaacatctccctattccctccagtccccaacctgtggtaacccacattctactctttgctgctattagttttattggtttagattccaaatgtaagtgacaacatgcagtacttgtatttctgtgctgaagcctggaaaaacagaatacgcaccccatgtaagactgaggatcaatgacagaaggattttgttaggtgtctttacggttatgctgagaacaatcttagaagatagaacccactcgcttatcacacacccccatgaaagtggcaaaagcagaatggaagaaatggccgagggacctcgacaggcggagacggctggagactcttccatgaggtttggggcagcagatgccaaggagcagcagccaatgtttccatctcctgagcaggtcttccacgcacaggaaatggggtggaacataaacaggtctagacgtcaggactaaggactatggaggcttcccctctgacccatatggactaagaactgagcaccatatggaattaaatacagagggagagaccaagaaagaaagcagtttcttcagaaggaaccatagagttcaaatgacagggtgttgtccatcatgataaagactttgcctctatctctaaggcaacttattttcccaaagaactctctcatctgcagagagtttcccactttatttatttatttattttgagacggagttttgttctgtccacccaggctggagtgcagtggcatgatcttggctcactgcaacctccacctcccgggttcaagcaattctcttgcctcagcctcctgagtagctgggactacaggcacacgccaccatgcccggctaatttttttttgtatttttagtagagatagggtttcacaatgttggtcaggctggtctcgaactcctgacctcaagtgatctgcccaccttggcctccctaagtgttgagattacaggcgtgagctactgtgccccctcccacactctagttaatgagtggccttctctctgcccatctgagctcttacctgtgaccacgcctttgacacattccggcgttcttggttttcttgctattttcacacagctcttcacagtccagggctctttcccttcctccaacatggagataatattcatatcaaaatgacacagtcctgtttataaaaagaaaggatcacaatgtgccggggcttttccagaatcccagccctatgtttacatgagaggacattatatgtggatctaagaaaacttcaaaaattcatccactgggccaggcgcggtggctcatgcctgtaatcccagcattttgggaagctgaggtgggtggatcacaaggtcaggagatggagatcatgatggctaacatggtgaaaccctgtctctactaaaaacataaaaaaaaattatccaggtgtggtggcgggcgcctgtggtcccagctactcgggaggctaaggcaggagaatggcatgaacctgggaggcagagcttgcagggagcctagatcacgccactgcactccagcccgggcgacagagcgagactccgcctcaaaaaaaaaaaaaaaaaatcatccactgaatgcctccttctgaatacccaggaaacatggtacatgctgatagaaggctctattccaccaacaacttaatccaaagcagagaggtagaaaacaggaaatctgacatttcaaaagtctaacacaatgtattatgcatacaaaagctctgaaacctcaaatgatgaagtacaaaggaggcagaacatctgagaaaggggaagattaaagtccaggtttcccatgattaagctttccatttcagagtcaacaggacttcaatctcagtcaagcaatgcaggggctctccagggactcgtaagggaaaatgcaacaatagacaagaacagatcttgacttctggaagaaagtcatcctcacccagagaaacaaggttccagtagttctccaacatcacgtccctgtataagatcctctgagcagggtccaggcatttccactcctcctgagagaattctatggccacatccctaaatgtcaaccgtacctaaaatgaaaaacacatttcaccaagtggctaaggggagagttcaaaatttcacataaaaggagaagaggagaaaaatgtgagaataggttaaattgaagtgggtgagctgacagatccagattgtgacaatgtgacatacagatttggtcttcatccccctctcctgacataagagctcacttgaaatcagtggagtgataagtatctttttgtacattaatgggataattggtgtctggagcacctaggtagcttcaggatggagggcggtcaccggaactaaggctcggtgggtggtcactggaaaggctgaggctcggttagactaagcctctgtcctctcgggaggacagagggaatgaaagttcagttgatcaccaatgccaataatggaagcaaggcctccataatggggcctccatgaaaactcaaaaaagacagaatacatgagagaatacatcccagctcctcactcctttcccatatctcaactaatagatcacttccatctagatgttcatctgtgtgctttgtagcatcttctataataaatgggtaaatataagtgtttccctgtgttatgtgagccactcaagcaaactaatcaatttcaaggagggggtcatcagaattcacaattcacagctggtcattgagaagcacaggccacaacttgtgtttgtgactggcattaatgtgtgtgcgctgttgtgggattgagccctcagcctatgggagctgaccctatatccagatagacagtgtcagaatggaatcaaatatgagaacacccatttggtgtctgttgcagaattgtttatttgatgtgtagaggaaaacccaatacatccaaaatcacagaagtatttgtattatggaagcaaagcaggagaaactgagtctgtttttcccatattttcctacgcattaaggacttttgagcaagttatgtctccctaattctgtcttattattcttttacctaagaggttgtgatatcctctatatcagtgtcgatttctcagttttatgggcaataagtatacaaataaaaaacagaaaacaaggttatctctatggaagtgttagacattatgtttgacatactgagtgatattcaataactacatgaactaaataagcacaactggtatcttaagaaatgataatgcggccgggcgtggcggctcatgcctgtaatccagcactttgaaaggccgaggcgggtggattacttgaggtcaggagttcaagaccagcctggccaacatggtgaaacctgtctctactaaaaatacaaaaattagccaggcgtggtggcaggcgcctgtaatccaagctactcgggaggctaaggcaggagaatcacttaaacccaggaggtagaagttgcggtgagccgagatcacgccactgcactccagcctgggtgacagagtgagactccatctcaaaaaaagaaaactgtactgaagtgatgctgtctataagacagaggagtaggaagtcccaagcactacccatggagacacagatttaataacactacatggaccaaattgtctttgtgggaaatctggcaaccacatcagaggtcagaactcttttgaaacacctgctcacctgaggccctatcctgccatgatgtagtatcactgtgagaaaaccacacttccattttctcctggggagagaaagtatgggaatatccatctaacattctgactttttttttctcttttttcctgtaacacaacacaaggctcataacgttctgacttttcagggcactgctaagggacaagtttctgtcttgcctgaatataaacactgaagtaacaggaccccaggtaaggaagctactgagaacaaagccatccgtcataaaccagagcttgtagtaacgtacgcagacattaggtggcggtgcagcccccagcttactaggacaccagcgaggctgcggaacagccggcagacaacagaggcattcctgcatacaaactggcacaagctctttagttaagctacaatcaaaaagtccacggaggacgcatccttagaaaaggcttgagggatctccagagcctctagtcaggatgactgtagcatgtcttccctgaaggaagccagaatcaaaaactacaagtggctgattagtgaaatgctgtggtcccaacaggagataacgagatatcaaaagaagccaggcacggtggctcacacctgtaatcccagcactttgggagccgaggcgggtggatcacgaggtcaggagttcgagaccagcctggccaaaatggtgaaatcccgtttctacaaaaaatacaaaaattagccgggcgtggtggcggatgcctgcaatcccagctactcaggaggctgagacagagaatcgcttgaacccgggaggtggaggttgcagtgagctgggatcccaccactgcactccagcctgggtgacagagtgagactccatctcaaaaaaaaaaaaaaaaaagcaaaagaaaaaaagaaacatggaccatatgcagcaacatattaaatcaccacaaagtaatactaaagaagcagatatatatatatatacattatcaaagaaataacaataagactcctaaagttgctcagtgtattaagacagtactcataaacaacttcagaaaatcagaaaaacaataaatatgagattatcaacaaagagataaaaattatgaagaagaaacagaaattctagagctgaaaaacataactgaattaaaaaacacactagagccaggcgtgatggctcacgcctgtaatcccagcactttgggaggctaaggcgggcggatcacgaggtcagaagttcgagaccagcctggccaacatgatgaaacctcatctctacaaaaatacaaaaacttagctgggcatggtggtgggcacctgtaatcccaactactcgggaggctgaggcagaagaatcgcttggacccaggagatggaggttgcaatgagctgagatcgcaccactgcactccagcctgggaaacaagagttgccacctcaggggaaaaaaaaaatacacaaaattagctgggtgtagtggcatgagcctgtagtcccagctactcaggaggctgaggtaggaggatcatttgagcctaggaggttgaaggtacagtaagctatgatcatgccaccatattccagcctgtgctacaaagtgagaccccatctctaaaaaaaataaataaaaggagaaaatgaaatagaagaatgatgaagatagccaggcatggtgatgtgtgcctgtaatcccagctactcaggaggctgaggcagaagaatcagctgaactcaggaggcagaggttgcagtgagccaagatcacaccactgcactccagctttgggtgacagagtgagactgcatgtcaaaaaagaaaagaaaagaaaagaaaaatgaacaaatgaacatagcctaagggaagtgtggaacaccatcatgtggtcaactccaatgtcaaagtaagaagaaggagtataagagaacttaacctactgtgtctgagtgagaaagaaaaaatctgtatactctcataagtagtaaggcaactggagcagcaatcaaaaaaaaaaaaaatcctagaacaaagaccaggaacacatgcataactcataagcactgtacaattctactcaatgttgaatgaagaattaacaattctcaaacaattccaaataagtgaagaagaggaaacaacaaaaaacaattgtatgataccacccttagtctgacaccacccaagcaaatatatgacaaggaaacaaaagtgtaagatattattcgtgataaacactgatgcaaaagccctcaacaaaatactaggaaaccaaattgtaaagacattaacaggattatagtccatgaccaagtggactacacactgggaagacaagagtggttcaacagaagaaagtcaatgtaatacaccacactgacatggtgaaggaccaaaaccacatgctcatctcaatcggtgcaaaaaaaagttatttgacaaaattcaacatagttcatgataaaaatgctcaacaattcgggcacggtggctcacgcctgtaatctcagcactttgggaggccaaggcaggtggatcacctgaggtcaggagttcaagaccagcctgaccaacatggagaaaccccgtctctactaaatacaaaaatttagccaggcatggttgcacatgcctgtaatcccggctacttggatggctgaggcaggagaatctcttgaacccgagaggcggaggttgcagtgagactgtgccactgcactgcgctccagcctgagcaacaagagcaaaactccatctaaaaaaaaaaaaaaaaaaaaaaaataggctcaacaaatcaaggaaacttcagaatattagatttggcaaagatttcttggctatgacaccaaaaggaaacacaatagcagcaaaaaaaaaaaaaaagggactgcatccaaccgaaaaacttttgtgcatcaacagatgctaccaagagtaaaacagtatgcctgtgacaagtcctagccagagcaatcaggcgagagaaacagaaggcattcaaacagaaagagggctgcatgcagtagtttgcacctgtaatcacatcactgtgggaggccaaggtgagagggtagtttgagtccaggagttcgagaccaacatgggcaacatagtgagactctgtctctattttttagcaacgacaacaaaaacaacaaacgaaaaggaaaaggaggaagtcaaattatctctctgagaaggatatgattctgtatctaaaaaaccctaaagattccactaaaagactcctagacctgataaatgacttcagcaaagtctcaggatttaaaatcaaggtacaaaaatcagcagtacttttttttttttttttgagatggagtttcgctcttgttgcccaggctggagtgcgatcttggctcaccacaacctctgcctccccggttcaagcaattctcctgcctcagccttcctaagtagctgggattacaggcatgcaccaccacgcccggctaattttgtatttttaatagagactgggtttctccatgttggtcaggctggtcttgaactcccgacctcaggtgatccgcctgccttggcctcccaaagtgctgggattacaggcgtgagccactgtgcccggcccagtcagcagtactcttaaacgccaataatgttcaagctgagaaacacatcatcaagaatgcaatcctattaaaaatagccacaccccccaaaaaatgactaggagtatgtctaaccaaggttgtgaactatctctatgaggagaactacaaaataccagtgaaagaaatcagacaacacgaacaaatggaaaagcatttcatgctcatgggttgaaagaatcaatatcaatgaaatgtccaaactgcccaaagcaatctatagattcaacagtattcctattaaatgaccaacatcacttttcacagaattagaaaaaacttctaaaatgtatatgaaagcaaaaaagagctcaaagagccaagacaatcctaagcaaaaggaataaagctggatgcatcacattacctgacttcaaaccatattgcaaggctacagtaaacaaaacagcatggtactggtataaaaacagacacatataccaatggaatagaacagagacccctaaaataaaggcccacacctccaaccaactgatcttcaagaaaatcaacaaaaataaacaatgaggaaaggataccctattcaataagtggtgctgggaaaactggctaaacatatgcagaagaatgaaactggatccctatctctcaccatataaaaaaattaacttgagatggattaaatacttaatataagacctccaactataaaaatcttaaaagcaaacctaggaaatactcttctaagactttggcctaagcaaggaatttatgaagacctcataatatatgcagcaaaataaatgcagcaaataaaaggaatttatgaagacctcataataaatgcagcaaaataaaaaatagacaagtggaacttaattaaagagcttgtacacagaaaaacaaactatcaacagagtaaacaatctacagaatgggagaaaatacttgcaaactacgcatctgacgaataactaatatccagaatctataagaaacataagcaaatcaacaagaagaagacaaatcaccccactaaaaagtgggaaaatagcataaacagacacttctcaaaagaagtcgtactattggccaacaagcgtatgaaaaaatgctcaacaccccgatcatcagagaatgcaaatcaaaaccataatgagacaccatttcataccaggcataatggctattactaaaaagtaaaaaaaaaacaacaaatattgacaaggcttcagaaaaaaggaaacacttttacactcatacacttatgggaatgcaaatttgttcagaccttgtggaaagcagtttggagatttctcaaagactaaaaatagaattacaattcaacccagcaatcccattactggatatgtacccaaaggaaaatagattgttctatcaaaaagacacctatattcatatgtttattgcagcaccatttacaatagcaaagacatggaatcaaccttggtgaccatcaagtggatcggataaagaaaatatagtagacatataccctatggaatattatacagccataaaaaaacaaaatcatgtcctttgcaacaacatggatgcagctggaggccgttatccctagcgaattaatgcacaaatagaagaacaaataccgcatgttctcacaatggcagctaaacactgggtgcacacaaacacaaagatgagaacaacagacactggcgactccaaaaaggaagaggaaggaagaggggaagggctgaaaaactatctatcgggtactatgttcactacttgggtgatgggatctttggaagactaaacctcaacatcacaaaatatacccatgtaagaaacctcacgtgtaccccctgaatctaaaataaatagtttaaaatgaatcaaataaaagtacgtaccaatgtacacaaaaaaattcaaatccatgagacatattctgtggaaaaatgaaattgtttttcctactataatctcagaaaatgcttctaaaatcagatgtggccaggtgcagtggctcatgcctataatcccagcactttaggaggccaaggcaggagtactgcttgagctcaagagaccagcctgggaaatacaatgaaacctcatctctacaaaaaaatcaagctgggcatggtggtgcgtgcctatagtctcagttactccagaggctaaggtgggaggatcacttgagccccagagatcaaggctgcagtcagctgtgatcacacgactggactccagcctggacaacagagtaagagcctctcaaaacaataaacaaacaaacaaataataaataaacagatgtatagttttcccctatgccagcaagcaatcaattgtgcagcagacaccgcctgggtatcctccaaccccagttcagtttcaataccatctacctggagatagtggcaaatcccacaggttgagggttcagtcccacttcgggcgccaacagcaagccccaggttgtttttcctgtgcttttgacagactgactattaatcagggttcctgtaactccctcattgggttcaattaatttgctagacctcacagacctcagggagacactttatgtacatttacccatttattataaaggatattacaatgaatacatatgaagagatgcatacagtgaagtattggaaaaggggttggaacttccatgccctccctgagtatgccaccctcaggaatctccacgtgttcacctaaactgaagctctctgaaccatgtgcttttgtgttttcatagaaacttcatgaagtaggcatgattaaaccattggccactggtgatcaacttaaccttcgtcgcctctccccctccctggtagctgaggagtggagtttaaagccccaatcttccaatcttgccttggatattctggcaactcaggccccatcctgaagcttgttggaggctgccagctatcagtcaatgcatcagcatgcaaaaagacaacacttaggaaactctatagattttaggagctgtatatgccaggaactgggtcaaagacaaaggccatgtgaacaatccactggtagataaagataaagcataccatttcatttcgttaaggccttccaaaataagataaactgaacaaataattgagaaaggggtaagcaacgaaagattatttttacagtagaataatgtgtaatcgaaaggaagacaacagtgcgtatataaagaattaaaccaagccgggcacaatggctcatgcctataatcccagcactttaggaggcacagtcaggaggatggcttgggcccaggagtttgagaccagcctgggcaacatagtgagaccctgtctctacaaaaaacaaaaacataaaaaattatctgggtgtggcagcacacaaccgtagtcccagctactcaggagactgaggtgggacaattgcttaggccaaggaggtcaaggctacagtgagccatgactgtactgtaaccaagtacgctcatttttctaagaaaaagggagtgagttattatttttttctcttattttctcctttccccattttcccctgttccctacttcctacttagccctttagaaatacacttataaccttttacctccccttcagcagacactctctacagggcaagttcatccaactatgtgcttcgagctccagaggggaatctcacttgccaggaggttacctcgagaaacagcaatcaatctacaacccaaagtcctgctacaaaactctctcccacccggagagtttcagccacttttacaacccagttctgcccacgaaggcaccagtggctgccagctcaaccccctggtacgtaaggcacagaagcaagttagggggacacccacctgctcgcttcctctccttagtgccattcatgccaagcccgccttttaaaagcgcctgctttctgctccaaaagcaatgcagtaccttacggcaggaagcctgtacttcttcccctaagctagctttggaataaaaagtcactgtctttctaccagaccttgctcttgttaactggactctgcaagcagcgagcaactgaacctgcatgtcagtgacagagccgccgtgctccggcctcgctccagcaacagggtgagaccctgtctcaaaaaatgtagtaaaagttaaaaagaaaataaaccgcagaatacaacacagctcctgaattccaggaacagaaaatggagcaaagtataaaaattcatttcatatatacacatccacaaagtaatgcaacccactcagactcacaaggaataagaaaatgaaaataaaatgggttgcattatccccgcattttcataatataaaatgaacacagtggcaagtttgcttaatgagggggaaatctgacgtggcattggtgggagagggcacctctgcacctggggtagggatagaatcttgccagatctagcaacacaggaaatgtgccatcctagaagagatcactcttccaatcgtccagcctggaggaactctccacgatccatagtgaagtcggcatggtcacaggcagccagggtggcaccttttttttttttttttttgagacaaggtcttgttctatcactcaggctgaagtgcagtggcactatcatggctcactgcagcctcaatctctggggctcaaatgatcctcccaccttggcttccacaagtgctgggattacaggtgtgagccaccatgcagcaccctgtgtggcattctttatagaagtgagaaagttaaaagatccacctgtcttcattcccagcatgctccaacaaggatgtagaaaagtgagctcctgtttcctaacacgaaaacatgtcaatgttcaaaacttgcaggttaacatatcacaaccaaacattcactgaggaatttgtttaaatctcataatgatgtcaaaatacatttctacaggacttgcactgacccttcccacagaattgagaacagtggctccccactaagatgtgagggagggtggaaggctggacaggaaaagggatgctttacctcttggcacataaatgtatcatttcactataaaagaaatatatacatgatgccatgttcaaaataaaagaaacaaaatgttgactcataactggtaaaacaaaaatacagttccattctctctaatggcaaggttgttctgcttatatgccattctcacctacaatacccgacggacaaaggttcttgtaagaacatcacagtctccatgggatagagcttctgagactagtttaatgaatcttgttacacatttatgttgacgtcatacattaaaatggatgatggaatgaaagaatcatctatctccaatgtcagtgtctaaactttccattctgttcccagtctttacgagtttggagtcggaaatccaatgactcacttgttcggcttcaaatgcagttaccaatgaggcaggaaagctttccccttagtgttcttttctatgccagtgagcaggtacgtgtgcacctgacttcatgggcagcttctgttatcatggtttacacagcgctgacagtgcatccagatgcggcccctgagcaatccctgctgcccaacagcactgacaccacaggaccctcaccccgtctccatccatgtctgggtgtgagcccttcccaggaccatgcccagtgcagcctcttcccaagttcatgtcactggatcacgggagatggaatctaaacgagatgagagggactgagggaaggcgcgggtgagtgctagcaaacatgtcaggcaggacgcttcagactcagagaagattcgcaatgccaatgccaggcatttcaggaagaaataaaagaacaatccaccaggagtatcactttacctgagtaagggccatccctgactccttttctttcctcttcctcttcttccagacttcttccttgggtaacataaaagagtctttagaagtcaatactgaatatccaaaatatgctgcttagggctgagaatctatacatccccttcatgtgccacagtcacacgcacagatctcaccctgtggaaagatggtcctctgcgccccactgcaccagggggaatacggggacgagaaactcctacaggaagaagtgagtttctgacccctttcttcagaacccaccttcctcctggagaagcccacacacactgcagcagtggggagctgggctggactgagctcccctttaggacacagacccagccctgaccaaaccccatgcagaacacagcccccctcacctctctgtggatcccaggctgagctcagccttcagaaacaaaagacagtgattggtactatgctggctacagaatagagtcaactttaaatattactcagctgggctctaaaacactgaaatgaaaatacgtcaagggggcacaagagatgtttctgcaaaacgcctaggcactctaatatgaagccagggttgagctccactgagggggtgagcccagcacagccccaccttctggctctgctctcctgttggggacttgttctcaccaggatccagactggatattgaaggagcaaaaagaatcacacagaacaggcaacatggaccagaggtgggggtgaaggtgggcctgcaatgtcaaataggaggctgtgggagatcacaaacgtttccacggaggaagtgatgtcagaacaaagacctcaggaagaaaggctgcttgtcacttgcagctgagaggccagggagttctaggcagagggccagcccacatggaagccttgaggcaggagcaaccttggctccaggaaaaggaaaggggcctgtgtgactggagcagagggggctgggaggacacaggaaggagatggcgtctgagaggtcctgagggtgcagatcacgcagggagaggtcttcaaacattctttctcccatacgtcaaaaaaatttatgaaaccatgtatttcctcacctgttttaagtaaatgcttaattttttcttcattttacaaagtaacacacttacaacatagtatcttgcatattttaaacatgacaagaagttcagctgagccccaggaagtacagggttgcccttagctgagatgtgcaagactgcaggggtgaatatgtttggaggagtttgggaagtcacttttatttaaataattaattaattaatttttgagagagtttcactcttgttgcccaggctggagtgcagtagcgtgatctcggctcactgcagcctccgcctcctgggttcaagcgattctcctgcctcagcctcctgagtagctgggattacaggcgcccgccaccacgcccggctaattttttgtatttttagtagagatagggtttcgccatgttggccaggctggtctcaaactcctggcctcaggtgatccgcctgcctcggcctcccaaagtgctgggattataggcatgagccactgtgcccagccaagaagtcacttttaggcatatgaaaatggagatgcctgttgggacatccctgtagagagttttggagacaactagacacaggattctagacctcagaggagggtctgcagggtacatggggctgagtattaacaggtggggcataaagccatgagatgagaagtacggaaaggcagtgggtgtggacggagacaagaagaggtgtaaggactgagccatgagcacttgcacattcagagaacaagaaagttctggagacaccagaagaggaaagcagaaagtgatcagagtggcaagaagattgaatagatttgtaaaggttaacggggtgtcataaaagccaagataacagaagaggaagtgatcagctgtgctacatgctaccgacaggaagaaaaagatgaggacaggacatgaattacggcatttaggaattgggaggtcactgatgactgaaaaaggaagaatcagtggaatgctggatgtgaaagctagattcaagcaacaattcaaaggtttaagcaataattgaagacaaagtggccgcacacggctcacgcttgtaatcccagtactttgggaggttgaggtggaaagactacttgagcccaggagtttgagaccagcctggccaacacagcaagatcctgtctctatatttttatttaaaaaaaaaaaaagaattgaagacaaagtaaaactagtttttagaatattatgctcttaaatagagcacaaataggtacttattacagagggaaatgtagttgaaagtatttttttgtcttaaagatggaagagtagaagaaaaaaaggctttatcatgcattggagatctgttcagagaggaaaaaaattgttcatactactctgacactctaacacagaatatttcacctctagtcaccaaaatgtgtgtcattgtccccacaatgacagcttctccagcagactcccaggtagggagtcctgctgttttactcaattctgacaccgtctacaaaacagaatcagacaccacagcttgagggttcagtcgcacaggactgccctcacttcatatgctgtacgctctgactgacctggtcaatgtgcttccctaacactttccttgggtttgaataactagctagcacagcttttccatctggctgttcatctgtgtcctttgcaacatactttataataaatgagtaaactaagtgttgtcctgagttcggtgaatgaccgtggcaaattactacaacctgaggaggggggtcaagtgaatccccaatttacagttggtcgcccagaagttcaggtcccaacctgcaacttgtgaccggcatttgaagtgggggtagccctgtggaactgaccaaccagtaaacagcatctgatcctaattctagctggacagtgtcagaattgagttgaagtataagttcacccagttagtgtcggatggaaaatgcattgctggtgggaagaagttcctccacattttggtgatgagttttctgtgtggagtgttcactattacattgactgtacactattatattgactataatcagcatcatataatactaaatattatgtaatcagtattacattaactcatgttctcgcccctacccaaccccatcccagggaaatggaggaagagcgtggcccacaaatgaatgagtcaagtcactgccctctggctgaaaaggttacaagtggaagctaacctctgatgccataattataaaatgcatagccttatagacaagttttgcaattctcatctttatctgtgtattttaagcatatttaaaatctgttagattataaagacagaaatcaacatgtcacaactaaattacccatattcaatcaactcaccactcacctgaaccaaggtcccctccttcttccttcctgtgtgtttccctctctcattctgtacatatctcatcctcaccttccctccctggctctttttttccgatgtttccccccaggtttctgctcctcattttgagcccctctcctctcctgctctttctccccttcttccctccattccttctcttccccctgttctgctccattcctacaacttcttccacctcttattcctttctgcccaaacttttcattgtcccaatcccaatctccacatatttctgcctctttcttccctcatctttgctccccctctgctccccctattaaatcccctcttccctgttacaccccttgtccccactctctggcacccccagatccaaagccttcccatactgtggttctccctctgctctccttgtcaccagctgtcccgtcttgctgtcccagcaccacattgctgtctgccctgactccaaattcctcctcctctcccccactctctgtctgaggagcctccccctttctgcccctctccctatcttgctgtccttcatctctctggagacccagcttttctctatatttctccagttgctccctgccccacactttctcagctttgtctttcactctcagtgtctgtctgcaaattccccacccatcctctgcgttgccatctgttcatggttctcacccgtccttctcactccttctcagtttttctatttcctctttctcctgtctctctttctcctgatcccctgtggccacatatttacagggaaggggatggaataagatgcccacctactgaaagcacttttcctagtggagtggaatctgggacaaaagaacattggaggtgaacagacaggcccaagtcacctccttcaacgctgggtcagaggaagccatgcttatgagggggaggcctgcaggatagagggcaaggctcaatgagagcaagatgggagggtgtctcaggggaggggtgggatctgtggaatcccaggaccagggcgaggactctcttgcaccggagctgcggtgctgctgtgcagacgcaatgaagggcgaggcttaggggacccaaagggtgaatgcacctcgcgggtgaggaccttacaaggcacagggtgggaagtgagtaaagggttttaagcaggaaatggcatgaaagctctctacatgggctgaaggcagaaatactgcaagcaggacctgtctgtgtggttcaatgggaagtgacccctgacctctcatggacacctctgaatttacttgggaatgaaagagccatgaggggatactaaggtctatagggtccggagtgacggctcatgcctgtaatcccagcacttcgtgggctgtaatcccagccgaagcgggaggatcacttgagcccacaaattcgagaccagctcaggcaacacagtgagacttcctctctactaaatatatataaaaaaaattatttaaacgtggtggtggtacacaccggtggtcccagctactcaggaggctgaggtgggaggatcgcttgagcccaggaggtccaggctgcagtgaactacaatcactcatatatacacatatgtctctgaggactcctgcaaatcgagtctggatgtgcaggagcctgggaagcccaagtttaacctaaacagagggaaactcacgtgtgaggtcttcactccaggtgatcagcttccagtggctgcaagaagagctgggtcccctgtaggcggggcccggggcaggcgcctcgtgcagagaggccaggagttgggaggtgcctgagggatgaagtgggcgggggacttggggaaagggggcggtgcctgcgctcccctccctctcactcccaggagtctgtttccagagctttggaggagagacctaccagcgaggctgaagccactcagtgggctgggagccgggatctctctaggtcgtcagggggcagtgttcggatccaggaacgtttctgcaattaaaattaagcatttaaagaaatgctgtaactgaatgagatgcaaactagaatgtgaaatgcaaaatttgagcttagcagggagtgtacaatttcatgctgatcagcagaacctcctttccatttctattccccgcgcactcaggaaggacagcgtcaacctcggttccagagcagggctaaggcctaggtattggttaggtcaataacttgctttttaaaaagcagtaactttttacaaatagaaataaattccattgttcttcctttatcccattccactcttgagatgacggcctcaaatacctttgagataaactttgtcattgtaatatgcttatgtcaataatctctacatatggcgtaatttgaaattcacttcacatgcattccaaaagtacttgaagaaacggaagagaaaccaaagaacatagattacaatatttaaataaaaattgttttctaagtacttattttaatctgttgtagaaaaaaagcctgtaaaatcatcttcagaaaacatttacatttatattcacctcaagggtaattaattttgcaagattttaagcgtatttgatagggtattttttttttcttttgagacagagtctccctctgtcgctcaggctagagtgcaatggcgcaatcttggctcattgcaacctctgcctcctgggttcaagcgattctcctgtctcagcctcccaagtaaccgggattacaggcacacgccactaggcccagctaattttttttgtatttttagtagagacggagtttcaccacattggccagggtggtctcaaactcctgacctcaagtgatccacctgctttggcctcccagagtgctgggattacaggcgtgagctaccatgctggctggatattctccttcatatgaaccctatacaaagtaaaactagattatcaaatattaaatggcatcgtatctactagcaataattttatggcaacatctgtgaatttacctctactttgaagtatgtttgcctctcacatccccacatgtggaagatttcatcaatggaaaagtggtgattaattgaaaatacaattgtttagacaggaaaaatagcatatttcacaactacatctacagtttcaaaagatatggtgtctgggatagatttggggacttttgcaaggtagactgctctgtgttacgcaatattgctaagtacctatgttgacaagaaagcagtttcagcatggacttccatgatcccaagcaaagaaatgatttgattttggatcttttcattaaattgagaatagtaggggtgaatctgattatagatgaaagccatgaatccattttgtatatgcagagtttaaatgcttatacattttcattgaagcaaaatcaacatattcacaagagatttaaaaaggatatttctggccgggcacggtggttcatgcctgtaatcccagcacttcactttgggaggccgaggcaggtggatcacctgaggtcaggagttcaaaacaagcctggccaacatggtgaaacgttgtctctactaaaaatacaaaaattagccaggcgcggtggcagcgcctgttatcccagttactagggaggctgaggcaggagaatcacttgaacctgggaggcagaggctgcaatgagccaagatcgtgccactgcactccagcctgggcaacagagcaggactccatctaaaaaaacaaaaaaaaagaagaaaggatggaagggggaggcttaacctttgctatctgctaggattacagggtcaaaatcggcttctacattgtcaacacataacaccaagtgaaactcaaaactaatgaacttgccctggtaccttggcctttgagactcggcactgaatccagcctgggcaacatagtaagaccccatctatacaaaaaaatttagaaattatccaggtgtggtggtgcatgtctatagtcccagctattcaggaggctgaagtgagtgtgagattgcagtgagctatgatcgcaccactccagcctgggtgacagagcctgtctcaaaaaacaaaaaacagaagaaaaaagctttgaagggcactcagccttcactgtgggtgtactgaatgttcctgtcacacataagagacatcattaactgctaaaggaaaatttcagctaattgaaaaaatgagatgcaccaacttcatttcaaagccatatacatttaaaattcccttacaattgtgtaatagatcaacaattgaaagataaggaaacaaggcattagtgatgcacatgctccaatgagaccccgatatcatacaaggtaacactccaaactattttatcttccaaaatgcatccgaaagcttcttgatctacaacacaaaatactccaaaataccaaaggtaacccagaaatttatctctgagattttccctataattcctctattttaaaaagtattctttatgtttaagggaatggttggcgacctaaattaccagataccgttcctccacacaccctggtccagggtccttgaaacgcccctggacctaagcccagagttctctttcttccatcccggtgcctggcaaatagaaatggaaacgatgttccgatcgttgtcactatgaaactgaacacagcacaagtagaaatttcaccttcgtttcatcctctaaacagacaaatcaggtcccggattaattaaacggttctaattgccagttccaggatgaaaccactgccccacagggaccatccgctgatgcccctgcacccctcctggtaccctgagctaagatgagttgtgatcctcttaatggtaggatgcctgtctccacctgcaaacaaaatgagtttttcacttaaatcgttttcaatgtaagagtaaaaaaaccttagccttcaattaagtggcccagtaccattctgttcttttgccttaaattgtttgaaatgttggattaactgaaaataagcaggaagcgtccctggactgaaaataagccggaagcatccctgcttattaactgaaaataagcaggaagcatccccggctaatttcaattagctgaaactttattttagcagtgcaatgctgttgatccagtcctagtggagagaaaggctgacatagcagaaaatgacctggggccaagaggagtagagagcccaggcccgctcctttcccggccctgcccgcttcccacagcccaggctgcaccatagcagcttccaccctcccatcccgccgccctcttccagccctttcccgttgcccagaccccagcccagggcgacttttacccttctcaccccaccccttccccactgcccaggccccgcccccacggtagtcccaccctcccaccccaccctcttccacccctttcccattgcccagaccgcaccccagggcgactttcaccctcctcaccccgccccctccccactgcccaggccccgcccacagcagttccaccctcccacacgaccctcttgcacccctttcccattgcccagaccccacctcacggtggcttccaccctccccacctggcctctccccactatccaagacccgcctctcgctggcgacagctccctcccagaatccgcttccagttttctcaccggcaggagagcattcaggcctttcagggcactccagccctgtccaaccacactcggaatccaccatcccaccagacgttaaaatccccaggtgcgctcatgggattggtagcgagtcccagcgtttccgcgggaaactctgagacccggtggctctgcagcttgtctatgatttgaaccctccccttgatttggagactggattgctctttttaatactcccagttggtggctggtgtgcttcccagctgtccgcaggtttgttctcatgagagatgactccagagtgtctagtctttgctttgcataacggatgaggaatacaaaatgtcttaatcttatgaatatataaattgtctgtttatgcacaatgttcagtcgtttattcactcatctcccgtggaatcctaagcacaattataaaagagtcacgttacatgagatcagcgtctaacacaaagcttctgtctcaataacagtaaataataatagcaacattaaatgaaatattagtattgctaaaatgggagtgtagtaaaaattaaataagtaaataattaaaaggaaatgatatatggtcaggtgcggtgacttatgcttgtaatcccagcactttgggaggccgaggtgggcagatcatatgaagtcaggagttcaagaccagctgaccaacatggtaaaaccctgtctctactaaaaatacaaaaaaatgacccaggagtggtggcacatgcctgtagtcccagctactccagagggtgaggcaggagaattgcttgaactcaggagacagaggttgcagtgagctgagatcgcaccactgcactccagcctgggagacagaacgagactccgtctcaaaataaataaataactgaatgaatgaatgaaatattaggccatttttatggtcttcactttgggagactgatgtatgcaggggtggactgcatgtttgtccttggggtggtctttttcgtgagaagggagctgagcaggactaactgaggggcagagccaagggcccttcatggagaccactctgcttaccaacctgtggaagggcaagcgcaagtccacccagaaacacatctggctgactatgggatccctgtctgaggctcagcagacccacgtggccaataaaagaccctaaattctgcaaaaagaagagtttgtctctgtgcccaggcccctccatggaaaaaaggtcctggggtctaagatttctcacttggcaatgatgttggcttgaatattattcacagacccagatccttgggtcttgcgtggggcaaactgactgcagaactgcaggaagtgagagtctgaacagagcagcagaaaggcaggcaggagacctgagggaggggagaaaggagagagacaaacagaccaacccgtcctctccctcaatcacccgcctggggaagcattagtttcccatcatagagaggacaacggggaaagggagaagcgtgtgcataggatgagatgtgtgttgggtggacagaaagactcctttccctaaatgtgaccccattagctcaccccattctattgcacaaattcctgagcggaggggcaccctgtggggatgaacacagctcttcctgcctccagttcctgcgtctccctgccatgaccagggctgtaaccctccaactcccttcccagggccccgtggcccctctgcactggagaaaggtccatgttccacagcgggtttcaaggaccttgcccctcagctccccagctgccttgtgactctgtgactctgttatcttggaataaacagggagaggccaccggcctggctgcaagaatgtggcagctttatcttcccaaggacagtcccagtggaagcctttgggccgcaggtcagtgtgctgtgtttcactctgattcttggagaaatctttcccttactctgggaccctgataatcactccctcttgagttgcacccacagacgcccccacaacaaaccctccctaatgaaagccatctgcgcctgattcttaggatccccgttgccctctggactcagacacgcttacaaactcccacactccccatatacttcataaagatcccacaatccccagatacttcataaagatccagaagccctgttatgaaatctcacaagccccagtaactcatggaataatatacacaaacaccccaggaactcactgacccagggcaacgtatttccactcatagtgactccaccccacaggggaataccactgaaacctaccaataaaacagagatgtctctaatgatgcaattagaccccaacatcaggaaaggaaacactccaaatgatcatttcatcttccaaaacacaactgaaagcttattgatctgcaactgaaaataccccgaatgccaaaggcaacccagaaaataatctctgagattcttcctatctttcctctatgggtttcaggatggtttttgcacttcccaaagcctccacagaaatcaccccgtggagcggatgctgtggagcagctctgggatccacaccctcaggccaaggcgcccatcctcctgctgctgaagctccctctgggctcagcttaggtcttggttctaagtacacttcgggatgtttttctctgcctgattccactgccttcagtcctcttcactgtgatgatgagtttccgaattaaattcctgcatgcaaatctctgtgtcagcatctgtttcccaggtaacctgagctgagacatcagggcattacaaaatgatcctgcagccccacaaccaccccaaaacccacttccaggtgctacagccagacctgagacttctttccaagtgtgccacacatcccgtgagcccacagtcacctgtgggccaggtgcatgcagcattcatccagctcctctagaggctcagcattgcttccacgcctcactccacacctctaaggacttcttcacctgtccccatttttctacttctcttccagcctgagaagcacactggattgaaaggcctctggacacaagcgatgcggcaggaatggacacaaactgctatctgcaggacagtgggcctcaagtctagattctagaagttggccatgctggaaggaattgcccccaatttggggacaccatggaatccagtttaaaggcaggtgaagattggccggattgagctggcggaggatgtccaagaaaaagagaggccccagatctcatgagggaggctgccattgtccccttgtctctccactcacagtcccctgcaaaattcccccgctgtttagggagtgcctccttcatggcccacttagcttctgaacttctcgccacccttcctgaagggaatccaggacccctgactgcgagcgcatcacctgctggaaggcaaagcccctgcccaggatggccaccgggccccggtgatgtgtagagcgcggaagacccgggagctggagtaaggcggtggggacgcctcggcactggctgaggacacagggtctgcggggcttttcaggcctcagtgaggccttctgctcttacatagactggaataaatagccacaggaagtttagaccaattacggatgaaatttccagaatatgagaccatcctcactacccgccctatccttttggtcttccctgaggactcctcagcccgaccccagccccagcatctgaaccacaaccccagagcaggtgctgcagtcgtcccgtggccaagatggagacacaaaacactcaaaataatccatgcagaagagtgtccgatgtggtgatggatgcggagacagtgaaacctgagtaacgtggtagagactgacaggcagagagaatttcagatgggggtgcaagagggtggaagacagctctgaggctagacccgaaggagaagaaagggacagagctgtgatgatttggggacatagggtaagaggagggacaaagactgagacaggaaaggttttgatgtttgggaaaagagaaaaacaaatgtgactagggcagagggagtcatgagatgagggcaagctcccaggaggaggctggacactggcaggggccctggacgcagggctgtggagccacagtgaggagttgggcttttgtcctggggaacacgggaagccggtggagggttccctaccagggactgacatgactgctttagatttagccataactctaatgcagagaaaggcctccaaagatggtctctctgcctctgagtctacaccccagcttccatccttgtggttttggttttgttttgttttaaattttaaaggactgagtcccatttaaatttttaattgcagtgggcactccccaattcctagaagaactgcaaaacacagatgtacacccaattctgccaaacattaaggggattagtattgcccagactgaggtatattgactgagtccctcaccttcacgttgcaggtggatttactgagggctagacggggagatgtttcactaagtcatccaagttgaattagaagatgtatctgactctatgacggcctcgaagggctaatgggcaacactagactttctcacgcctcccctggaaaattccaggatcttctttcacatacctgggcaaaagaaacttccctttcatggctttatcacattgatcccaaacatttaattcctcttttccagaaaaacacaacatactaatgaaacgcagaactgtgaaaacatggctattggtgttgaaaacagtgaaagactgtcagctatagagatgagctctctcagcaaattttttcatgaacacataagctctgctggaataaggttttgagtcaatccagcccatctttccacatttacagaaaatagaactgacaaaagggacttgagggggacatctgcttagtagttcacaggtcactattttaagagatgacataagggaagaaaactgactagtaacaaataagttggccgagcgtggtggctcacgcctgtaatcccagcactttgggaggctgaggcgggtggatcacgaggtcaggagatcgagaccatcctggctaccatggtgaaaccccatctctactaaaaatacaaaaaatttgccgggcgtggtggcggctgcctgtagtcccaactacttgggaggctgaggcaggagaatggcatgaacctgggaggcggagcttgcagtgagccgagattgcaccactgcactccagcctgggcgacagagcgagactccgtctccaaaaaaaaattagttaataggttcttatgttaacgttaaaaaaaaaagcgtcactgatatctttaccaaatacacattcataccatctaaaattcctactgatggccggcgtagtggctcacgcctgtaatcccagcactttgggagggatcacttgagatcaggagtttaagaccagcctggccaatataatgaaaccctatctctactaaaaatacgaaaattagccaggtgtggtggcaggtgcctgtaatcccagctacttgggaggctgaggcaggagaatcacttgaacctgggaggtggaggtggcagtgagccaaggtcacacgagtgcactacagcctgggcatcagagtacctccatctcaaaaaaaataaataagggccaggagcggtggctcacgcctgtaatcccagaaatttgggaggccgagacaggtggatcacttgaggtcaggaggtcaagaccagcctagccaacatggtgaaatcccgtctctactaaaaatacaaaaaattagccaggcgtggtggcacacacctgtaatcccagctagttggaaggctgaggcaggagaatcacttgaacccaggagacagaggttgcagtgagctgagatcacgccactgccctccagcctgggtgaaagagcgagactgtctcaaaaataaataaataaataaataaaaatgaataaagttacctactgactaccaaagagtatttccaatatatgataaagagtagaaagcatgcagacctcaatctgaactcaacacaattaacttcaaatggaaaccattttgaaaatatatatattatttaatatgtatatgatatattaactatatatggaattctacaaagggaaaaaattgaaaatatatcacatttagaaaagaatgacatgagccaatacaggattccacaaaagcttacttcagcaataattacatatagaaaaagagactgaattagataagcttcatctcaaccttcagcatgaactgtgagatgaaaggtaaatacaaggcaccaggcagtgacacagccagtcactccttgcctctcttcactgcccccaccctaccccatcctcggaaacaggaagagggagacccataactgaatgaggcaagtcactgcccaatggctaaacagcatgggcaaatgaaagctagcctcttatgccataattgtaaaatgcacaagccttttacacagagctttgtaattctcatccttatatgtagaatttaaacaattagattacaatttaaatgtaacacattataaatagagaaatcaaattgtcatatccaatctcaactcacctctcacctggccccagggcgcccctctttctttataactatgtgttcctctcccccattttgtgcctctcactttcaccttgtctctccagcctttttccccttttatcttccccctaggattctgacgatgttgtgcctcttttttcttctgctgtttctcccttctttgttttttccccttatatctgttctactccattcttccaatttgtttcacctcttgtggcgttttctttccaatcttttcatcgtcccaatctccatctatttctgcctctttcttaccccatctccgcgcctcctctgctctccctgttaaatcccctcttccctgttacacccgcttatccccactctctggcactcccagatcccaggcctccctgtgttgtggtgctccctctgctcgccttgtcaccagctgtcccctccagctgtcccagcaccacgcagctctgtctgccctcggccaaatcctttctcctctcccccactctctgtctgaggaggctccttctttgctgtccctctccttatcttgttgtcctgcatctcgggacatcgagcttttctctacatttcgccaattgcttttctgcccctgctactttcttgactgcttctttcactctgtcgctgcaaatctctcacccatcctccactttgccatctgtttatgggtctccctcatttttcttttctctttcttggtttttccatctcctctcagtggctctttgtctctctttctcctgattcccttgggccacacattcactggagggtttgtagtaagatgtctgcatgttggaggagtacattttccagggggtggagctgggcaggcaaaaacaccgggtgtcacaggacgggccccgggcacctccccaacgagggctcaagggaagcggtgactgcgaaggggaggcctggggagcagcagggcccggcacgaggaggagggaggtggggggcgacggcgccttaggacaggggtgggatgtgcaggatcccaggaccaggcggaggcgcggcctccccgggactgggtcggcggcgctgcgctccaggggccgacgagagcgaggctgggaggcgcccagggcaggcggtgaggactttaagcgatgcggggcgggaggaggagtcagtaaaggattttaagcaggaaaatcctgcttaaacgtttaaaaaaccgggaaaggccgtgtttacttggcccaaggcagaaagaccgggggcagggaccagcctcagggcgactttaacccaaaaggaagcgtctccgggcccacacagcaaggcctatttacctgaggtggagggtgcggtgcggagattttaagtccgtagcgacccccgggcatcgggtgtgcgaatgggggacggcgaggcgcaggttgagtctacacagaggaacactcatacgccatggtgtgatgcttgctccgcacgatccacttccgggtctgtgggcaactgcgcgaaggaaagcgaccgagcggcccggggcggggtccgagatgggcggaaccggaaaagggcggggcgttgagagagccgggctgaagcaggggccgccaggcagggaccccagggaaggaacggggaggagccaccggggaggggtggggagtgaccaagtggagggacccgggggcgggccggggaggagccgccggggaagggcggggaggaaccgcgggaagggaccgcgggggaggaaggcgaagggaccgcgggggagggaggcagagggaccgccaggaagggacccgggggagaggcggggctggacgggacacgttagggtctgcgatttcgtgtgatgcccacagcccagcgcccagagccatctgtagtgtcttgtggaacggcgtagatgtttcaaacggtttcaagttaaaagcacagttgtgtaggttattttggaaaccaaactgctttcctcttagaatggaggcggtttatgttgaaagcattttttgctagcgcgtttacccagtaatgttattgacgctgaagcagcccaggagtctgggaacatgggttgacacggagcggtgatggcatgctggaaaagtttctgcgattaaaattaagtaatttaaaagccctgaaattagcagtaacttttaaaaaatagatataaattgcattgtccttttttatacttactattctattccgtgcgagatgacaacctcaaacgcctatactttttttttttttttttgagccggagtcacgctctgtcgtccaggctggggtgcagtggcatgatctctgctcactgcaacctcggcctcccgggttcaagcaatgctcctgcctcagcctcccgagtagctaggattacaggcgcccgccaccacgttctttagcggagatgaagtttcaccatgttgcctaggctggtctcgaattcctgacctcaagtgatccacccgcctcagcctcccaaagtgctgggattacaggcgtgagccaccatacctggccccaggaactactttcacctactgaatatatattaagtcctttgccacaaaaagataatatacataatttatctcagaacaattaagatatttaccactgtaaatgacaaattcagacttagagaaggaagattttattcaaaaggactattgcaatagagagaatgttccaatcacaagatctgaaaatgtccaagagacacaaactaaaaagcttttttttctttttttcatatatggaggagtaaacaaggctagaaagcacaagcacaagttatgaggctgtggatgagcacttggcatgactacagttattcagggaaagtttgttatgttatgttatgttatgttaaaaatgttacatatttcttggagagagtcttgctctgtcacccaggctggagtgcagtggcgtcatctctgctcactgcaacttttcatctaccaggctcaggcaatcctcccacctcaatctccccagtagctgggactacaagcacacgtcaccatgcctagttaatttttgtactttttgtagagacggggtttcgccatgttgctcaggctagactcgaactcctgagctcgagggatcccccacaccttggcctcccaaagtgctgggatcacaggcgtgagccaccgtgcccggtctatttattttttgagagagcatcttgctctgttgcccaggctagagtgcagtgtcaagaccatagctcactgcagccttcaactctggaatcaagtgatcctcctacctcagtctcccaagtggctgggactacgggtttgcaccgccacactccactaatttttttactttttgcaaaggcggattctcactatgttgcccaggcaagtcttgaacttctagcctcaactgatcctcccgccctgatctcccaaagtgttgggattacaaatgtgagcctggctcatcatggaattcaagaccagtttgggcaacatagcaagactcccatctctacagaaaatttttaaaaattagctgggcatggtggcacacacctgtagtcccagctactcaggaagattgcttgagcccaggagttcgaggcagcagttagctatgatcctgacactgcactccagtctgggcaacagagtgagaacctgtctttcaaaaaaaaaaaaaaaagcctactcttgggaggggctgttggctgttgttaaggaaaagttgttccaaattacactgacaaagaatggttcagagggttgggcatggtggctcacgcctgcaatccttgcactttgggaagctgaggcgagtggatcacatgaggtcaggagttcgagaccagcctggtcaacatggcgaaaacccatctctactaaaaacaaaaattagccaggcgtggtggtgcacacctgtaatcccagctactcaggaggctgaggcaggagaattgcttaaaccagggaggcagaggctgcagtgagccgagattgtgccactgcacttcagcttgggtgacagagcgagactctgtctcaaataaataaataaggctgggcgcggtggttcacacctgtaatcccagcactttgggaggttgaggcgggtggatcacgaggtcaagagatcgagaccatcctgaccaacatggtgaaaccccgtttctactaaaaacacaaaaattagctgggtgtggtggcctgtccctgtagtcccagctactcaggaggctgaggcagaattgcttgaaaccaggaggcagaggttgcagtgagatgagatcgtaccactgcactccagcctggcgacacagtgagactccatcctataaatgaatgaatgaatgaattaataaagtgaattagttatcaaaaacctcaaaaaagaaaagtctgtagctgggcatggtggctcacacctgcaatcccagcattttgggggaccgaggcaggcagatcccttgagatcacgagtttgagaccagcctggccaacatggtgaaacgttctctactaaaaatacacaaattagccgaacgtggtggtgggcgcctgtaatcccagctaccttggaggctgaggcaggagaatcgcttgaacccgggaggcggaggctgcagtgagctattgtgccactgcactccagcctgggcaacagagcaagactccgtctcgaaaaataaaaattaaaaaaaagagtgatacagctttcatggtgtaaaataactttcttgggattttcattatattcacataagtatcctgaggcagggtatgggcggggagaacaactcaagtgcactctgtaagtgtatgttcccaacactctatttaattccaagaaaaaaaaaaatggttctatctttcagccttaagagtctaatggtgtgttgttattgtctgttacaaagtaacctactgaggtgggataaaactatgttggcagagagaacatgatgcattcatagttatgcaaaaatcagattaattagcacgagatctatgatacattctgaataaaacagtagcaaaatgtaataccagcagtaaatgtgaatcctaatcaataacatgctattgtggttcatctctgaggttgtggtttctattgtggtttcaatcttggctatataacagcgatggccattccatgcagaaggtggccaccgttttcccctgaattatttccaccatgtaatcagtcactaataacccattacactcctcccacaaatcccagtgtctaaggtcttgatctgctctgattttttttgaggcacagtctctctcagtcacctaggctggagtgcagtggtgcaatctcggctcactgcaacctccgcctcctgggttcaagcgattctcctgcctcagtctcccaagtagctgggattacaggcgcccaccaccacgcccggctaatttttgtatttttagtagagacggggtttcaccatcttggccaggctggtcttgaactcctgacctcatgatccacccacctcagccacccaaagtgctgggattacaggtgtgagccactgcgcccggtcgtggtctgctctgtttcatggtcaggttgcaggtcatctctttcctgtaacccaaagtgccgtctatcaggagaacaccctaaacacaataaggatgatgatcaacaccatcattttgcattattctctgcctgcccccatgcttggtaatttgccaaggcagagtccttattcttcaaagaatctgaatagaaatgatcctcatctaatgcagtgagcccttccatcttactgattctttcccagacattgccatgaaaggcaggtaaggaggcctatcaacacatttcaaggttttggttgaaagtcataaatcctaaagtataaagtagtagccttgcaagacacctaaaataaataaataaaatattttaaaatctgagacaaccagtgacttcaaacatcctgcaacctttaatatatatcatgttgtgtgagttttaacatatttgggcttgcatttgttctacaatgtgtaatatgaaaagtttatcagcacaactagactgaattattcctcacataaatccttggatgtgttacagttttgatccttggttaatagcttcaacatgcacaaaatatacaaagatgtttacacattttgatgtctagtgagttgtgagacctaaatgaagcctctgccacacagttaggtgtatatgatttctctttagcatggactctgatgtcaatgaatgcttgaacttgtgatgaagggtttgctgtactcgtaaggattctctcaagaatgaaattctctgatgctgtgtaggagtgaattgtgactgaaaaccttgccacatttattatacttgtatggtttctctctgatataaattctttgatgactcacaggatttaaactttgactgaagaccttgccatattaatttcttttataaggtttctccttagtatggataatttgatgtctgaagaggtttgggcgcacactaaaggacttcccacaatcactacatttgtaaggtttctttccagtatggattatctgatgtctagtgaggtttgggcgcacactaaaggatttgccacactcattacatttgtaaggtttttctccagtatggatgacctgatgggtagttaggcttgaatgcacactgaagcctttgccacattgattacatttgtaaggcttctctccagtatggatgacctgatgggtagttaagttcgaatgcacactaaaggctttcccacactcattacacttgtaaggtttctctccagtatgaactctccgatgactcgcaaggtgtgaattgtaactgaaaaccttaccacattcattgcatttgtaaggtttctctccagtatgaattctccaatgccttgcaaggcttgaagtctgactgaagactttaccacattcattacacttgtatggtttctccccagtgtgaattctctgatgagttgcaaggcttgaagtctgactgaacaccttgccacattcattgcatttgtaaggtttcttgccactatgaattacctgatggttggtaagtgttgacctcacactaaaggctttgccacactctttacatgtgtaaggtttctctccaatatgagttttctgatgtagtgcaaggcatgaatttcgactgaagaccttgtcacactcataacatttgtaaggtttctctccagtgtgaactctccgatgtagtgcaaggcatgagttgcgactgaaacttctgtcacattcattacatttgtatggtttctctccagtatgaactctccaatgacgcgcaaggtttgatttttgactaaagaccttgccacacagatcacatttatatcctttctctccagaatgacttacctgacgtacagtcatgtgtgagccatgattcaaggctttgtcgcactcaatatatctgtaaggtttttccctaatgcatgatttctgttcttgtgtgagtaatgaagaacagatgaaatcagtcccatatttattagaaacatgggttttgatggtagaagaaattatttggggtggtgaaactgaggaaccatggttgacagacttctcaacatggttacattcataaattttcccttcagcttgaaactgctgcagttcatggggatgtggtagaaagcttaatccaagctgatgtttaatagacttgtttcctatacctcttctatcgcgttggtctctcctacaagtaagattttcttttggggccgtagtcactttgttgcaatttctttcatcatctctccactgacagtcaaagtcgtgtatttttttcttgatttccctgaagcaaaactcttcaatgtcatgtttttcatgttgttccaatgtcactgtgtggaatacttctcctgggttaccttcctgttgtggtgctagttccttgattacacagttacgagacagatctataagaaatgaaaaccataggtttccaattaattagagacagtatataaatatttcatactgaataacagaattacacaaaaagcaacatttatatacaacagagttataaaacttcccaatcatgatctttaatttttacgaacacaaaggaatcacattctttagtaaaaaaagggtgattacatggcattcaaataaattctagggaaggacagattcaaacatcctatgaccaaaacacattgtacaaacctacgttagccctgaaaggagtattttttcaccttgacagcaaagtacacaccaattggcagaaaatacatggctgtctcattattgaaataaatattacattttacctagccacagcatatttactgtgcccatataaatgaaaaaagtactacacaatatatcataatggtaactaagccacaacaaacttacggaataagtaagatacataaatgataattctgaattgcaaaacagtaatagcactgagaaaacgagacaaaaactaataaaacactgttaaaaatagctaatttttctgaatacctgttatgaaaatatctgtacccacctagaccaggcatttttgacattaatgagtgatgcatgtcagttatattgcatgaaacttactaaaaacccatcatctgtaaaccataacaattaattaataaaacactgtagtaacccatgataaaaatgcaaaccaaaaactagtaactacacttgtacaaagttatagcctgtaaatgattctctcctaagaaaaaagcaagaactatttcagaaccagcacacaacctgtgaactggaatatatgttaagatctctgacatttgatgcatgaggtcaggtaaacacatagcattataaagaagaattgaagaacaaagtcagaaatcacaattatgacttcacacctgcacttatgtaacaaacagccagtcaataacgcaattccctacatatgcattgccctttcatgacctagttcatcagccacacaatatacataagagtttgtacttggaaaatttattaactgaaatcagagaacacaatgtttaaaacgaattgaaaataaaatcaaacaaaatataatgcagtctctacggtctgaatatgttggccaaaattcgtatgctaaggtcctatcctccagtgtgatgttgttgcagatggcgcgtttgggatataattaggtcatgaggttggactagtcaaaaataggattaatgcccttacaggacaaaacataagagcttgttttctcttgccctttccatcatgtgggacagtcagcgagccagtaccaggaactgattcacctggctccttaattttgacttcccagcttccaggtctgggagatataaatttctgtggtttagttctcctagcctatgatatttctttttttttttttttttttttgagacccagtttctcttgtcacccaggctggagtacaatggcgcaatctcggctaactgcaacctctgcttcctgggttcaagcgattctcctgcctcagtctcccaagtagctgggattacaggtgcctaccaccatgcctggctaatttttatatttttagtagagatggggtttcagtatgttggccaggctggtctcgaacttctgacctcaggtgatctgcccaccacagcctcccaaagtgctgggattacaggcgtgagccactgcgcccggcccgcctatgatatttcttatggcacgatgagttatataagacagaaaaaggacaatctcatcacaatcatcacagaaggctgatcaatcttattaaacaaactttgggactttactgtaagacatgcaatattccaagtaatcacacaccaccaccttgttttaaaaactttcaagtaaattgttattatttttcaaataaacacattaggcccatggtattcatgtatctaacctaaattttcacagaaaataagagagaaaaacaagactaaatcctgggccagcaggctcagacttttttttatttttatttttggagacacagtctcgctcttttgcccaggctggggtgcagtggtgtgatctcggctcactgcaacctccgcctcccaggttcaagcaattctcttggctcagcctcctgagtagctgagattacaggcacctgccaccatgcccggctactttttttgtatttttagtagagaaggggtttaaccatgttggccaggctggtttcgaactcctgacctcaagtgatccgcccacctcagcctccaaaagtactcggattacaggcgtgagcaaccacgccgggccatcagacgtgtttttaagcacatgtccacccacaggcagtgtggaaaacctgggtggacatgtgcagtgtggaaaactatcagtcacagcaagaatgcacccaggcgaggagcatatgaagaaaaggagctacaagagctgggctgtgttgataatagtgttattcagtcagctctcatggaaggcagctatgctcaccactacaccaccaatgcatctagtcagtcagctctcatggataatggtatctgagtcatcacttcctacacatactgatttaggcagatcctgacttataaagcggttgagtagtgtcttgtcttgcatagtgagagtagtgtggagggtgaggaagtcctgtggcaattggggttttcaggaatacaaaaccaatatgctaaaaagcaacagtatattccatgcagatcaaggtatcatgtgaggataggagagaggaagggcaagagcacaggagagggagtaatgggcatgtcagaggaaaatctgcatgcacatgtgtgggatataattccactaggacagttacaattctgaccttggggccaggcgtggtggctcacgcctgtaatcccagcactttgggaggccgaggcgggtggatcacatgaggtcgagaattcaagaccagcctgaccaacatggagaaactctgtctctactaaaaatacaaaattagccaggtgtggtggtgcatgcctgtaatcccagctactcaggaggctgaggcaggagcatcgcttgaacctgggaggtggaggttgcggtgagctgagattgtgccattgtattccagcctgggcaacaagagcgaaactccatcttaaaaaaaaaaaaagtatcataaaaaatacagaatttacgactaaatgaaaaagatgttcatttataccacatgtaaatgtacaagatgaaactagtagtggcttaaacaaatgacactggactttaaaaaccgaggcattggccgggcgcggtggctcacgcctgtaatcccagcactttgggaggccgagacgggcggatcacgaggtcaggagatcgagaccatcctggctaacacggtgaaaccccgtctctactaaaaatacaaaaattagccgggcatggtggcgcacgcctgtagtcccagctacacgggaggctgaggcaggagaatggcgtgaacccgggaggcggagcttgcagtgagtcgagatcgcgccactgcactccagcctgggcgacagagcgaaactccgtctcaaaaaaaaaaaaaaaaaaaaaaaaaaaaccgaggcattacagcagtgtaaagcaaaaaaagaacaaacgaaaaaaaaccaaggcatcattcagcttcacaagctccctccacaagagggaggtttgaacctacaacaaattgaacccaggctgaacaaaggtttgttgatgagaatgaacaatggtgcacacaggatggaaaatgaacaaatgtggtgtgaacaatagtttagtcaagagcctcatacatatgatgctgtgaacttgaacaatgtcatcgctaggagaaactcccacaccaactgctggcttaggggagatgatcattagtttatgtgtccagcgctgtcacagtgccctccaggtacacttttgtgaggctcctcaaaactagaaggacatctggacacacttgtcagtcaggctcgcctgatattttgtatcttatatcctgagccatgctgacaattctgctgaacgctttaaggggcatctctacatgtagcaggatgctattcaattatattaaagagttttccctcataaattttctgttatcatataaacaccctccacaagagactccaggagaaggtatgcataacctataggttggttatcatagcaggaatagagaaatgacagactccaggagtgtgtatatcaaaagctgggtttgtttttttttgaaacggagtctcactctgttactcaggctgtagtgcagcggtgccatctcagctcactgcaacctccgcctcctggggtcatgtgattctcctgcctcggcctcctgagtagctgggattacaggtgcatgccaccacacctggctaacttttgtatttttagtagagacggggtttcaccatgttggtcttgaactcctgacctcaggtgatccgcccacctcagccacccagagtgctggaattacaggcgtgagccaccgcacctggtcaaaagttggttttcagaggaaaaatcatgcaaacttaagagaaaacaaaatcaggaagagccaaggtttttccacattcatatagcagtgagaccaacggaaaagagagaaaaatacaacatatgaggctagattttgaaagatcttgagatgggattgtctgctctgcctacagagggatcctaagctaagagcctgaaagactaagacgtactccctgtgtaggacgggggatcccagtgaagacctgtcaactgttcttacagttctgcagagtaacaatcccagaagaaccaactccctcccctggtccacacacccacgaactgtggcaaaagcagaacagaagaaatggctgagggaccacaacaggtagaaagggcttgagacagctccttgcagctccccggggcctcagatgcaaagaaggagcagccagtgtttcccatcttgtgggcaggtcttccaagcaccagaaatggggtggagcatggatagctccaggcatcaggactgtggaggcctcccctctgatctatatggagagcgaactgagcatcaggtggcatcaagaacaggagagaccggccgggcgcggcagctcaagcctgtaatcccagcactctgggaggccgagacgggcagatcacctgaggtcaggagtttgagaccagcctgaccaacatggtgaaactccgtctctactaaaaatacaaaattagccaggcatggtggtgcatacctgtaatcccagctactcgggaggctgaggcaggagaatcatttgaatccgggaggcgaaggttgcagtgagccgagattgcaccattgcactccagcctgggcaataagagcgaaactccatctcaaaaaaaaaagaacaacagcaacaaataacaggagagaccacgggagaagtagacccttgtgatgtggcccctcccggacccctcagagtgaaggagccagagagttcacggaagtcagagggcaatgctgtccatcatgatgagcacttccatttgtctctgtttgagctgcagcccccactggacagcaaaaggatcaactatgacacgtctcaagagcagagggagaagtaggggaagtttaaaatttcctctaagagctcacaggatataaacatttgttttcctacagaactctcccacttgctaagagtttccaaacatagtgtaatggtgtggcttcctctcccctcatctgaggtcttacctgttttcacacctttgatccattcccacccttttggttttcttgctactcgtacttggctttctatggtccagggctctttcctgtgctcccacataggataatactctggtcaggaagagaatttcccgcttataaaatgaatggaacatgatgtgctgtggcttttcaagaatctcagccctttgcttggataagaagagaggctatcacagatggatctaggaaaatatttcacaaattatttcactgaatgccaactctgaatgcttagggaagactgtaatatgcaaatatctagctcccttccaagaactactgaatcaaagcacaggggcagaaaacaagaagtgagtatttcagaagtctaccataagctttcatggatacttcagctctggaaccaccactgttgtatcatgaaggggtcagaaaatctggaaaaaggggatggttaaactccagagttcacattatggagcttttcatttcagagtcaacaaggcctcaaactcagtcaggtaatgcaggggctcccaagaggcacacaagggaaaatggaaagataccaagggcagattttgacttctggaagaaaattatcctcacccagggagaccaggttcctgtagttctccaacatcacatccctgtataaagtcctctgtgtagagttcaggcatttccactcatcttgagagaattcgatggccacgtccctgaatgtcaactgtccgtaaaataataaacacatttcaccaagaggttatgaagggagttaccatcttcacacaaaataagaataaaagagaatttaagtatagatttaattgaagtgtgtgttctgataaatccacactaaggtatttttgagtacatatctctccctaattgtggttttttttctctctttttttttttttttggtttgagacaaggtctcgctctgctgcccaggctgaagtgcagtggcatgatcatggctcactgcagactcaatctcccaggttcaagtgaccctccaaccttagctttccaagtagctggactataggcatgtgtgtacaaagtacatttgaaaacttcaacaatgaactagggatcaagcaaaagaaaaaatttcagaacttgaagacaggtcttttgaaataaacgagtcagacaaaaataaagaaagaaataaaaaagaatgaacacagcctatgtgacatatggggcaggcaccataaggtgaccaaatatttgaatttttggtgtcccagaaggtggagagaaaatcaaaaaagatagaaagctatttaacaaaataataaccaaaaacttcctaagtatagtaaaaggtttagatatctagatacaggaatttcatagattctcaaagagatacaatccaaaaatgtcttcttggcacattatagtcaaactgtcaaaagtcaaagaaaaagaaagagaattcggctgggcgtggtggctcacgcctgtaatcccagcactttgggaggccaaggtgggcagatcacctgaggttgggaggtcgagaccagtctgaccaacatggagaaaccccatctctactaaaaatacaaaactagccgagcgtggtggtgcatgcctgtaatcccagctactcgggaggctgaggcaggagaattgcttgaatctgggaggtggaggttgcggtgagccgagatcacaccattgcacttcagcctgggcaacaagggcgaaattccgtctcaaaaaaaaaaaagaaagaaagagaattctaaaaaaaaacagcaagagaaaagcatctagtcacttataaagggtgctccataaaacaggaaatttctcaatagaaaccttacaggccaacagagaatggtatgatacattaaatgtgctgaaagaaaaaaaaaccctgccagccaaggatactatactcagcaaaattatccttcataaaaaggagaaatagtctttcccagagaagcaaagcctgagggaattcttcaccactagactggccctacaagaaatgcttaagggatccctacatctagaagcaaaaggacaatattggccgtcatgaaaacacacaatactataaaacccactgttagagcaaacatgcaagtaaggaaaggagtcaaatgtaaatgttactattatagaaaaccaccaaaccacaatgaaaaacaattagagaaaggagcaaacatacaaaacaaccagaaatcaattaataaagtgacagtaataagccctcgcatatcaataatgaactttatgtaaatggattaaactttccacataaaagatatagactggctaaattgatacaagcgtgtaacccaactatatgctacctttaagaaactcatgtcaatgtaaagacacaaatagactcaaagtgaaaatatgaaaaaaggtattatatgcaaatgaaaccaaaagcaagcagaagtacctctacttcaatctaacaaaatgaattttaagttaaaaacagtaaaagagatgaaaaaggtcattatatactaataaagagatcaattcaataagaggaatataacaattctaaacatatatgcacccaacactggagcatccagacatatagggcgaatattattagatttaaagggagagacacaatccaaaaataataatagttagggatttcagcattagacagctgatttagacagaaaattaacaaagaaacactgaatttaaactgcactttagactaaacagatctaagagatatttacagaacatttcatccaacaagtacagaatacacattctttgcatcagcgcatagaacattctccaagacagactacatattagaacacaaaacaagtctcaacacatttttaaaatatcaaaatcttagtatcttcttagaacaacaatggaataaaattagaaatcaataccatgagaaactttgaaaactggcaaatacatggaaattagacaacatgctcctaaatgaccactgggtctaggaagaaattaagggggaaattaaaaaaaaaaaatcttgaaacaagtaaaaatggaaacacaatatgtcaaaacctatggaatacaacaaaagcaatgctaagagggaagtttatagtaataaacacctacttggaaaaagtagaaaaatttcaaataagccaggcacggtggctcactcctgtaatcccagcactttgggaggccaaggtgggtggatcacctgaggtcaggagttcaagaccaccctggcgaagatggtaaaaccccatctctactaaaaatacaaaaattaggccgggcgcagtggctcacgcctgtagtcctagcactttaggaggccaaggcgggcggatcacgaggtcaggagatcaagaccatcctggctaacatggtgaaccccgcttctactaaaaaaatacaaaaaaattagctgggtgtggtggtgggcgcctgtagtcccagctactcgggaggctgaggcaggagaatggcatgaacccaggaggcggagcttgcagtgagcccagaccgagccactgcactccagcctgggcgacagagggagacttcgtctcaaaaaaaaagaaaatacaaaaattagccaggtatgtgcctgtaatcccagctactctggaggccgagatgggagaatcgcttgaaccagggaggtggaggttgcagtgagccaagattgcaccactgcactccagcctgggtgacagagcaagactccatctcaaaaaaaaaaaaaaaaaaaaaaaaaatttaaatagacagtctaacaatgcacctcaaggaactaagaaagcaagaacaaatcaaacccaaaattagtagaaagaaaaaaataacaaagatcagagcagaactaaacaaaataaatactacaaaaacacaaaggatcaacaaaatgaaatgttggttatttttaaaaaagataatataatctataaactactagctagattaatcaaaaagaagacccaataaacaaaatcagaaataaaatggatacgttacaactgataacacagaaatataaaagatcatcagagactattataaataactacacactaacaaactagaaaacctagaggaaatggataaaatcctggacacgaagcaccaagactgaatcaggaagattcagaaaaccttaacagaccaataatgaaatttaatcaggaataaaaagtctctgaacaaagaaaagtctgggaccaaatggcttcactgccgaattctatcaaactttcaaagaagaactaagactgattctcctcaaactaaaattgaaacggagggaattctccttaactcattctatgaagccagcattcccgatatcaaaccagaaaagaaaaaaaaaaggaaaactataggccgaaatccctcctgaacacagatgtaaaaatcctcatcaaaatactagcaaattgaatattttgctatattcccaacacataaaaatgataaatactcaaggtaatagacacttcaaataccattacttgatcattacacattctatgacacacgtaacaaaatatcacatctgccccttaaatatgaaccaatattatgtatcaacttgaaaaaggagcaagctatccttgttccttaatacgaaaacgtgtaaatattcacaacttgcaggatagaataccctaacaaaacatttactgacaatattgttctaaaatctcacaatgattaaacacatttcaacagggcttgagctgtctgttctcacagaactgacaatagtggctcaccactgagacctgtgtgagggtgtaaggcttgacaggaaaagggatactctatatctaagcactaaatatctctattgagagtttcaccataaaacaaatatatacatcatgtgatgtttaaaataaaagcagcataatacttaataacaatacatataataagaatatggatatatcctctttaatgaaaaaggagttctgctctgatgtctgagcaaaactgttaccatttttacctaaaatatctgatgcctaagagaccctgcaggaatagcaccatctccgtggtatgcaagtgctgagaatggtttaaaaacttggctgggcgcggtggctcatgcctctaatcccagcactttgggaggccgaggtggatggatcacgaggtcaggagttggagaccagcctgacctacacggtgaaaccccgtctctactaaaaatacaaaaattagccaggtgtggtggcgcgtgcctgtaatcccagctagtcaggaggctgaggcaggagaattgcttgaacctgggaggcagaggttgcagtaagctgagatcgcgccactgcactccagcctgggtgacagaggaagactcaaaaaaaaaaaaaaaaaaaaaaaaagtcctacagctggccgggcacagtggctcccgcccgtaatcccagcactttgggaggccgaggcaggcagatcatatggtcaggagttcaagaccagcctggccaacatagtgaaaccccatctctacaaaaattagccaggcatagtggcgggtgcctgtagtctcagctacctgggaggctgaggcagaggaatcacttgaacctgggaggtggaggttgcagtgagccaagatcgagccactgcactccagcatgggcgacagactgagactccgtctcaaaaaaaaaaaaaaaaagtcctacaattatactttatttttgtcgttgttgttgttgacacagagtctcgccctgtcacccaggctggagtgcagtgcagtggtgcgatctccacttactgtaacctttgcctcccaggttcaagtgattctcctacctcagcctcctgagtagttgggattacaggcgtgcgccaccacgcctggctaatttttgtatttttagtaaagacggggtttcaccatgtttgctggtctcaaactcctgacctacaatgatccgctcacctcggcctccaaagtgctgggattataggcctgagccaccgtgctcggccttacagttacacttttatgttgactttatgtttcaaagtcaataaaggaataaaacgccctctagtactgatgtctgtatctcaactttacattccattccaagtcattaacagtgtggagtcagagacatactgatatactagttttatctggattacaaaatcaggcacaaaatatatccccttattggctgccttttccaggatttaccaggtatttgtctatattaacacctgactttaggccaggcacggtgtctcatgcctgtaatcccagcactttgggaagccgaggtgggtggatcacctgaggtctggagttcgagaccagcctgaccaacatagagaaaccccgtctctattaaaaatacaaaattagctggttgtggtggtgcatgcctgtaatcccagctactcgggacgctgaggcaggagaatcacttgaacccgggaggcagaggattcagtgagccgagattgcgccattgcactccagcctgggcaacaagaatgaaactccatctcaaaaacaaacaaacaaacaaaaaacaaaaacaacaaaaaacatgacttccatgggcagcttctctattcctgggctacggagagccgacagtgcatccaaatgtggcccctgaacaatccctgctgcccaacagcactgacaccacgggaccctcaccccgtctccatccatgtctgggtgtgagcccttcccaggaccatgcccagtggactcttcagaagttcatgtcacagggtcagggtgagacggaatctcagtagagatgagaaggactgagggaaggcacgggtcaatgtgagcaaacgcgtcaggcaggatgcttcagactcagagaagatttgcagctccaaggcattgtctcccacctttctgaaaagagggagacagaatgatccacacagaatctttctttacctgagtaaaagccattcctgactcctttgctctcctcttctgggtttcttcctcatgtgccaggagtctttggaagtcaatgctgaataacaacaacaagtgctgtttattgcttagaaacaacacaccccctcttgtgtgacaagcacacacatacacagggaggagctcgccctgtgcaaagacggtcctctgccgcccactacaccagggtggccccagggacaagaaactcctacaggaaaaccaatacatgagtcttctgacccctttcttcagaactccctcccctcctggagaagctcacacacatgctgcagcagtggggaggagacccagccctgattaaaccccatgcagagcacagccccctttccctctctggatcccaggctgggctcagccctcagaaatagaggacacagagccttggtgttcagggctggatatagattagaatcatgttgggcactgtattatcgagggtgggtcccaacctgtgtgaatgggaatctctgggacagggatgggggcacaagaggtatatctgcaaagtaccccagcactttcatatgaagccagggggtagctctactcacatgtggtcagcccagcatagcccccaccttctgactctattctccccttgagaccttggtgtcatcaggatccagacagtggaagcagaaagaatcaagagaagcatgcagaggaggtaatatggaccagaggtgggggtgagggtgtagctggagtgtgaaatgggaagtgggtcacagaagtccccgctgagaaggtgatattggaaccgagacctggggaaggaggggtgtttgcacctgcagctgaggggccagcgagttccagcagaggcacagcccacgtgaaggccttgaggcaggagcaagctcggcccaggaacaggaaggacgcatgcttggctggagcagagggagcgaggaggacacaggcaggagatgaggtcagagaggtcctgggagggcagatcaggcagggcagatgctgtcaaacatttttctcccacacctcaaaagaattttggaaatgatgtatttcctcacccattttaattaaatatataatattttctttataaattaacccacttacaatgtaaaatcttatatatttgaaagtcccacgaaatacatggtcccgctcatctgagatgtgcaggactgcaggggaatgcatctagggagtcaggaagtcacttttggacacctgaaagtggagatacctgttacatgtcctagcagaaagttgaggagaaggctaggcgcagtggctcacacctgtaatcccaccactttgggaggccgaggcaggtggatcacctgaggtcaggagttcgagacccacctgaccaatgtggtgaaaccccatctctactaaaaatacaaaaaaattagccgggcatggtggtaggcactggtaatcccagccacttggtaggctgaggcaggagaatcgcttgaacccagagggcagaggttgcggtgagccgagatcgcgccactgctacagcctgggcaacaagagaaaaactccgtctcaaaaaaaaaaaagaggtttatttggctcatggttctgcaggctgtacaaaacacagtgccagcatctgcctctgatgagggcctcaggaagcttccgtttagggtggagggtgaaggggcgccagcagggcagacaaaatggtgagagaggagacgagagagagagagagagagaggtcaggctttttgacaaccagctctcaggggaactaagagtcagaactcactccctagagaatgacatcaagccattcccaagagatctgctcccatgacactcaccaggccctacctccaactttggaaatcacatttcaacatgagagttggtggggcaaaacaaatcatatcctaacaattgcacattctgaggctatgagtggggctggcgtgtggtacacaattggagggttagtagcagccaggagcaggaacagaccattcccagtcactactgagtagggatcccaagccctgagacaggtgggtgggtaagttggaaaagatctcttccttgcttccagggactcaacggtgaaaaaaaccaaggcctttaaatgagcaaaaagaagaaagaaaatctccagagacaaggtgcagaatagaaaaataggagaatggaagaggtgcggggcaggaattaaatgacaccaggaattctggctgtatgttttctccaggctgtggtcagctacacagggacagaagcagagtaacggagctggatgtggggatgtctgggagaaacaaatgatttagtgcacttgacttgcaaatcatctagtaactgaaagggtctgtttatgtccaatttttttttttttgagacggagtctcactctgtcaccaggttggagtgcagtggcgtgatctcggctcactgcaacctccgcctcccgggttcaagtgattctcctccctcagcctcccgagtagctgggattacaggcacatgccaccatgcccggctaatttctgtatttttagtagagacggggtttcaccatgttggccaggatggtctcgatctcctgacctcatgatctgcccgcctcagcctcccaaagtgataggattacaggtgtgagccaccgcgcctggccttttttttttttttaaacaggatcttgctgttggccaggctagagtgcagtgatgtgatgctggctcagtgcagcctcggcttcctgtgctgaagcaatcctcccacctcagcctctcgagtagctaggactacaagaggcacgagccaccacatctggctgatttttaaattttttatagagacaaggtgtcactatgttacctaggctcgtctcaaactgggctcaagtgagcgtcctgtctcagcctctgaaagtgctgggattacaggcgtgagcaaccatgcctgccatatcactatcattttaaaaataaactggagccaggcgcggtggctcacgcctgtaatcccagcactttgggagcccaagcagatcacgaggtcgggagtttgaggccagcctgattaacatggtgaaaccccatctctactaaaaatacaaaaattagccggacatggtggcacgcgcctgtagtcccagctacttgggaggctggggcaggagaattgcttgaacctgggaggcagaggttgcagtgagctaagatcacgccactgcactacagcctgggcaagagtgagactccatctcaaaaaataaaataaaataaaataaactggatatggtagaggcacatattcttttgttttaccattattattcctggtgtagacaaaaaaaaaaaaaaagagcctggcacatgacggagtatttgttgaataaatgagcagaatgatacagggtgacactagtgcaccctctggtacggtgttcactttgagggactgatgtgtgcaggggtcctgtttcacctgaggattgtcttcaccgagagtgagaagggacctgagcaggaccagctgaggggcagagccaagggcccttcatggagaccactctgcttaccaacctgtggaagggcaagcgcaagtccacccagaaacacatctggctgactatgggatccctgtctgaggctcagcagacccacgtggccaataaaagaccctaaattctgcaaaaagaagagtttgtctctgtgcccaggcccctccatggaaaaaaggtcctggggtctaagatttctcacttggcaatgatgttggcttgaatattattcacagacccagatccttgggtcttgcgtggggcaaactgactgcagaactgcaggaagtgagagtctgaacagagcagcagaaaggcaggcaggagacttgagggaggggagaaaggagagacacaagcagaccaacccctcctctccctcaatcacccgcctagggaagcattagtttcccatcatagagaggacaatggggaaagggagaagcgtgtgcataggatgagatgtgtgttgggtggacagaaagactcctttccctaaatgtgaccccattagctcaccccattctattgcacaaattcctgagcggaggggcaccctgtggggatgaacacagctcttcctgcctccagttcctgcgtctccctgccatgaccagggctgtaaccctccaactcccttcccagggccccgtggcccctctgcactggagaaaggtccatgttccacagcgggtttcaaggaccttgcccctcagctccccagctgccttgtgactctgtgactctgttatcttggaataaacagggagaggccaccggcctggctgcaagaatgtggcagctttatcttcccaaggacagtcccagtggaagcctttgggccgcaggtcagtgtgctgtgtttcactctgattcttggagaaatctttcccttactctgggaccctgataatcactccctcttgagttgcacccacagacgcccccacaacaaaccctccctaatgaaagccatctgcgcctgattcttaggatccccgttgccctctggactcagacacgcttacaaactcccatggggtcttgcactccccagatagtccataaaggtcaggcactgcctgaggacacagggtttatagaagcccggctacgaaatttcgcaagtcccagtaacaatgaaataatacacataaatatcttagggtctcactgacccacgacaatgtatttatttccactcatagtgactccaccccacacaaaagtaccaccaaagcctaccaataaaacagagatgtctctaatgatgcacgtgccccaatgagatcctaatatcttccaagaaaacactccaaactgttatttctatctttcaaaatgcatctgaaagcttcctgatcggccgggcgtggtggctcccacctgtaatcccagcactttaggaggctgaggcaggcagatcacgaagtcaggagatcgagaccatcctggccaacatggtgaaaccccgtctttactaaaaatacaaaaattagctgggtgtggtggcgcgtgcctgtagccccagctactcgggaggctgaggcacgcgaatcgcttgaacctaggaggtggaggttgcagtgggccaggatcgcaccactgcactccagcctgccaacagagcgagacaccgtctcaaaaaaaaaaaaaagaaaaagaaaaagaaaaagatactagggctttccaaactaatccatgcagtcccataaccacccataaacccacgtccatgtgctacagccagacctgagacattcctttacaattctactcactccttgatcccacaagcatgcgtgggacaggtgtacacatcattcacccggctcatctagaggcccaccttgcttccatgcccctatgtgacacctccaagaatgcttcttcactttccctcatttttctacttctcttccatgcatgaagagcacactaggctgaaaggcaaaagggcctctggacaaaagcaggaatggacacaaactgctatctgcaggacagtgggcctcaagtctagattctagaagttggccatgctggaaggaattgcccccaatttggggacaccatggaatccagtttaaaggcaggtgaagattggctggactgagctgacggaggatgtccaagaaaaagagaggccccagatctcatgagggaggctgccattgtccccttgtctctccactcacagtcccctgccaaattcccccgctgtttagggagtgcctccttcatggcccgtttagcttctgaacttctcgccacccttcctgaagggaatccaggacccctgactgtgagcgcatcacctgctggaaggcaaagcccctgcccaggatggccactgggccccgctgatgtgtagagcgtggaagacccgggagctggagtaaggcggtggggacgcctcggcactggctgaggacacagggtctgcggggcttttcaggcctcagtgaggccttctgctcttacatagactggaataaatagccacaggaagtttagaccaattacagatgaaatttccagaatatgagaccatcctcactacccgccctgtccttttggtcttccctgaggagtcttcagcccaaccccagccccagcatctgaaccacaaccccggagcaggtgctgcagtcatcccgtggcccagatggagactgtgtcctccaatggagggagacacaaaacactcaaaataatccacgcagaagagtgtccgatgtggtgatggatgcggagacagtgaaacctgaataatgtgatagagagtgacgggcagagagaatttcagatgggggtgggagggcacgggagacatctctcagtctagacccgaaggaggaaaaagggacagggtcacgatcatttagggacatagggtaaaagcagggacaacgacccgtgacaggaagggttttgacatttgggaaaagagaaaagcaaatgtgactggtgcagagggagtcatgagatgagggcaagctcccaggaggaggctggacactggcaggggccctggacacagggctgtggagccacagtgaggagttgggcttttgtcctggggaacacaggaagctggtggagggttccctgccagggactgacgtgacctgctttagatttctctgtgatgtcctcatacagagaaaggccccgaagatggtctctgtgtctgagtccctgcttcacattcttgttttcatttttagaggaagaaatccaaataaaaattttaattgcaactggctagtccccccacatacaactgccaaacacaaatgcacacccaattttgccccaaatttcaggagtcagtgttgctcacattgaggttttctggtctagtcccttatctctgttacaggtgggctcactgaggctgagagagggagtcatttcaccaagttatcctgagaggtctgagttgagtgagaaggaggagatgtggctgaattatgatgtcacgacctggaagggccaatgggctgtgtttgcctttatcacatctcccttagaaaattccaggactggccaggcatgttggctcgtgcctgtaatcccagcacttcgaggctgaaggaggggagattacttgaggccaggagtttgagaccagcctggccaacatgatgaaagctcatctctatcaaaaaacacaaaagttagccgggtgtggtggcctgtgcctgtaatcccagctactcaggaggctgaggcaggagaatcgcttgaacccgggaggcggaggttgcagtgagccgagattgcaccactgtactccagcctgggtgagagagcaagactccagctcacaaaaaaaaaaaaaaagaaaagaaaaaaagaaaattcccagaccctctttcacatatctgagcaaaagaaacttcttcaaggttttatcacattggttccaaatgcagctcacagcttactattttaacaaattacacaaaagaagaaaattgaataatagactagttaaactaggtttccatgttaaggtaaaaacatcattgacatctttatcaggtacacattgaaacaatctaaaattacctactagtcaacaaataatgcttctattatataataaagagcagaaagcatgcagacctctatcaaaactggacacaattaatttcaaagggaaagattttgaaattgttaagaaatatctgatgaattttggagctaaaaaaattgaaaacacattatatttagaaaatgccatgagctgattataggatgccaccaaagttactttggaaataattatatacagaaaaatagaaactgaattaatgaagatctatctcaagttgcaaaatgaactatacatgagatgaaagggaattagtaagaaaaaaagcaaatcaattacaaaaagcaacaacactttttttgtttgttctttgtttttttttcagacgcagtcttgctctgtcaccggatctcggctcttggctcactgcaacctccgcctcccgggtttacacaatgctttgcctcagcctcctgagtagctgggattacagatgcgtgtcaccatacctggctaagttttgtatttttagtagagatggggtttcaccatctttgccaggctggtcttgaactactgaccttgtgattcacccacctcggcctcccaaagtgctgggattacaggcatgagccaccatgcccagcctcaacacttttaatgttccttttgagcaacgttgtccaatccgcagcccaggaaggctttgaatgcagcccaacacaaattcctaaacttccttaaaacattttgagattttcttgcaacttttttttttttttttttttttttttttagctcatcagctattgttagtgttagtgtactttatgtgtggcccaagacaattcttcttccaatgtggcccagggaagccaaaagattggacacccctgctttagagagacactatgtagtgacagtctttcactttctgcccagctttactctcccactcccccttcccctccccctgccccaacgccagggaaggggaagaggatgacctgtggaattaatgagtcaagtcacttccctctgccttaacagggattgcaagtggaagctaacttctgatgccataattataaaatgcaccagccttaatagacaggagctttgcaattctcatcatctgtgcattttaaacttataaagacagaaatcaacaggtcaaaaggtagtcatcacatccagtcagttcacaactcacctggacctggggtccccctctttcctcattatggtgtgtttccctccctcgttccgtacatcgctctcattctcaccttctttctctagctctttccttcccctttattttctccctaggattctgctcattttgagcccctctcctctcctgctgctcctccccgtcttccctctattctttctcttccacttgctctttccattcttgcaatgtatttaattcctctttcttcctaatcttttcattgtcccagtctccacatatttctggctctttcttccccatttcagcactccctgttaaattccctcttccctgttacacaccgttgtccccactctttggcacccccagatcccaggcctccccgtgctgtggttctccctctgcttctccttgtcatcggctgccccctcttgctgtcccggtaccacactgccctgtctgccctggctccaaatcccttctgctctcccccactctctgtctgaggagcctcctcctttgctgcccctctccctacctggctgtccttcatctctctggatactgtgctttttctcgaaatgtgtctagttacttttctctccctgctactttctcggcttcttcttccactcttactgtctctgaaaatctctaaccatcctctactttgccatctgtttattggtttgcctcattccttcctgtctcaggttttctactgctctctctgtccctcgatccctttggcccacacattcacaggacggtttggggtaagacgcctgcatcctggaggagcgcattttccacggggtggaggagggcaggcaagaacatcgggtgtcacaggacaggccctgagcacctccccagcgcgggctcaggggaggcctggggagcagcggggcccggcacgaggaggagggaggtggggcgcgacagcgccttcagacaggggtggggtctgcaggatcccaggaccaggcagaggacgcaaggctccccgggactgcggctgcagctgcggcgctgcgctccaggggccgacgagggcaaggctgggaggcacccaggacgggaatacacctcttgggtgaagactttaaaaagcccggggatgggggagggggtcaggaaaaggttttaagcgggaggaagaagcaaaaggccggggacggggagcagcctcaaagcgacttcaacccaaagggaagcgactccggacccacactgcgaggcctgtattcacctggggtggagtgtacggggattttaagggccgtatcgaccctggacatcggctgtggaaatgggaaacagggagcgcaggtttaatctacacagagggtcactcacgctcgacgccgtcaccttcacccaacgcgatccgtttccgggcctgtaggaaactgcgcatgcgcggagagaagagcccgggcagcctgaaggaatggctggagtgggcggggtctgcgccgctttaaggtaaaaaaatcagagttgtgtgggccacttatggtggaaaccaaaatgttttccacttaccaagttgaaaacggtttatgttaaaactattttgcctgcaggttggacccgatcctgctagggagtctcctgcagcttagcagtccgggaactgggatttcggtggggaatccaaaactagcagtgattggatccataaaagttaccaaaaaacaaaaatgaagtgtctggaatcactccactggatttcaagactaccaatataggaaaggtaataaaaactgtgtggttttggggcaataaaagacatatggattgatgcaatacagtaagagagtacaaaaatagcctctacaggtacttccaactgatttttgacaaagttaccaagggaattgaatgaagaatttttaaaaactggtgaggggctaacttaatatccacagcaggaaagaagtcatctctactcaaacttcacaaccgtacagacattagttcaacattgaccatagcctaaatgtaaaatatcaaaccataaaatggtatcctgtaggagactgaaagaaaaaattactcacaataaaatcgtaagaatcaagagcttgttcaaaaattcttagccatagcagcaaaagcatgattcattaaagaaaaaaaaaatcaactggtatttaccaaattaaaaacttttggtctgtgaaagaccttcagacgatgaaagaaaaggtatttgatatggtttggctcagtgtccccatcaaatctcattttcaagtataaacctcaggtgttgagggagggacctggtgggaggtgactggatcatgggggtggttttccccaagccgttctcatgatagtgagctctcaggagatctcatggtttaaaaatctgtgatagttcctcctttgatcgctctctctcctgctgcaagcaagacgtgccttgcttcgcctttgccttcctctatgattgtaagtttcctgagggctccctagccatgcggaactgtgagtcaattaaacctcttttgtttataaattacccagtctcaggttgtcacaggagggtttaggcagtgtgaaaatggactaatacagtactgaataatagaaaatatttgcctaccatatatctgacataaaactggtatgtggaatgtataaagaatcctagaacgacttaaaaaaaaagcaaaataatcaaattagaaaatggatagaactatgaagagacatttcactgaagcagatatactgagataaatgggcacataaaaagatttccaacatcaccatccatcaaatctcagacctcagcatattctgctttctccatgtgaacccctggatgctgtcagagatcatgagaaacacaggagcttctactgaacagtccagttgatgtgtattagcaacctgtaattgtttttggaaacgaacaatggaaacacagatacaaaaatattctcagctcaagaaatatgcactttgtcattattagtgatttttttttttttttgagacagagtcttgttctgtcacccaggctggagtgcggtggtgtgatctcagcttactgtaacctctacctcccaggctcaagcgattctcctgcctcagcctcttgagtagcttcaaccacacgcacgcgccaccacacccagctattttttgtatttttagtagagatgggttttcaccatgttggccaggctggtctccaattcctgacctcaggagatccaccccccttggcctcccaaagtgctgggattacaggggtgagctacagcgcctggccaccactagaactaacacctcaggtactggatgcctccttcgaaagattggataatcgttcttacaggattatgtggtaatgagtgtctctgtcattcatttaggtaagatgcatacgcaatagtgatctataaaatatagacttaattgatctataaaaatatagatttaatacaaagttaccacaatcacaatgatatatgaagataaaccatttaaaaattacaagagatactaacaaaataggtatagatggtgagtaaaggacaaaaataactagcattgttactgtagcatcatcattaaaagctttgtctttgcaaccagacaacatggattcaaatctcgattctgcctcttactgaaatgtgacaagatgagtcttttaaagcagaatatgctgagatctgagatttgatggatggtgatgttggaaatctttttatgtgcctatttatctcagtataactgcttcagtgaaatgtctcttcatagttctacccattttctaaatatatatatatatatatatatatatatatatatatatatagagagagagagagagagagagagagagaaagagagagagagagagagagagagatggagtcccgctctgtcactgagactggagtgcaatggtgggaactcggctaactgcaacatccgcctcccaggctcaagcaattctcctgcctcagcctcccgaatagctgggattacaggcgcccgccatcacacccagctaatttttgtatttttagtagagacggggtttcaccatgttgatcaggctggtctcgaattcctgacctcaggtgatccccccgcctcggcctcccaaagtgctgggattacaggcatgagccactgtgcccagcctaatttgattattttgcttatctgtcctaagtttcctcacctctgaaatgagaatatcattaatacttatttcaggagctgatgattcagttgttacacataaagcattaataactgtgattcttactctaaatgtgattgatataaaatatatatgcaaagataaatcacttattaaagaatatatatcagttttttaaaatggaaacaaatctaaggggagtatattaaatggcagctgtcattgcaaaagttgcacaaatatcatgttttgctgtaagatcctctggctcagaaaagaaataccagccacagtaggaagttgaattgcctccagggattcaatgagagaaattatctcctttgcataaatgataattaatatcttggggactctcttattaactgtattttcatttacttctccagatgctggttaacctccacacgcttgattttcaagcatctgatctttgataacttccatattaagagacttcatttcaccatctagtatccctgtactttaattgaactaaagatttacaaggacactccattttcctatttacagagaacctagtctgtacctgccattgttttacatacattttcatgtcacaaaattttatttctaaacaacaccctcatttatgtattttctaagtgttcactggagtaacacagagaagaaatgcagtaaacatataatttggattaaaatgtatggaaggaaaaaatccttaaagtaaaaatcatatacaaaaacaaaaagtcattttactactattggctcatggctgtaatcctagcactttgggaagctgaggcaggaggaatgcttgaggccaagagttcaagaccaacctggccaacatagcgagaccccacgtctaaaaagaaaaagaaaaaaaaaaagaaaagaagctatggagaatatgttacacaataccataaactgaacaagacatgaatataacacagcctttggaaaaatgccctttggctaaaattgcttgatcatattatgtaataaacttttccacaaattcatttgcattgaactactgtaaaaatattttaggcaatttaaacagcatttcacaaatattttcaagaatgacgttgtgtaatgggccctatgggttcagcagaaaggaagagtattatctactattatgaagaaagcggaggtcttccctaacaaagaagttagaaatttcttttgtttttttgagagtctcactctattgcccaggctggagtgcagtggtgagatctcagctcactgcaacctccgtctcccgggttcaagtgattctcctgcctcagcctccctggtagctaggactacaggagtgcgccaccacacctggctaatttttgtatttttagtagagatggggtttcaccatgttggccaggctcgtcttgagctcctgacctaaggtgatccacctgcctcgggctcccaaagtgctgggattacaggcatgagcctgtaatttctggccatgcctggccagaaatcagaagttgcaagagtaaatattcagtgttgtactacagtcagtttccattttgtgatttttgtcttataccaccatttatacctctgcactccctcttcttattctgcccatctggccaagctgataatgtccgtgttccctcctttggcactagatggaagttcaaatcacgtgtgggatcctcaccccaacccacccttttattaaaggttattaccataacaccccaagcaagttatttatccctgctctctcaagccattttggaccagtttgggaagtcaatcctgcttctcacagaaagcctcattatgcaatacacatttccctaaaacttcattgttcagcatcctcattttccatatctaaaccaaactgtaaatggagttcaatacacttcctgtggagaggtgacaaattaacattaccaaaaacatgataaggctaaatttatgaaacttctagtttacctacaaaaacaaaatttccattatatatgttcatttttaagaggaaactcatgaatattagtcttgtcaaattatgtgagcatagcattcttagtgttatttttgttattctgcactatttataatttcataatttttttttttgagacggagtctcactttctcgcccaggctggagtgcagtggcaatctcggctcactgcaacctccacctcctgggttcaagtgattctcctgcctcagcctcccgagtagctgggattacaggcgcatgccaccacatccaaccaatatatatatatttggtattttttagtagagatggggtttcactgtgttggccagggtggtctcgattttctgaccccatgatccacccgccttggcctccctaagtgctgggattacaggtgtgagccaccacacccagccaatatttttcatacaattgttttttttgagacagggtctcgctctgtcacccaggctggagtgcaatggcgcgatcttggctcactgcaacctctgcctccaggctcaagtgatccacctgcctcagtctccctgaggagctgggactacaggcatgagccaccctgcctgggtaatatttctattttttttgtagagacagggttttgccatgttgtcctggctggttcaaactcctggactcaagtgacccccctgccttgggctctcaaagtgctaggattacaggcatgaaccaccacacccagcccatacactttctatatttgtattttcacttcatgtaaataaagatgcatgccatagttatttagcacacaagcatgtaaaaatataatatggtatatattcaccaacactgtggcagctttcagagtgtaagagtatgaaaactgcactttctatgggattttcattatatccatataaatattctaaggcagagtgtagagagaataattcaagtgcagagtatgattacattttcccaaaattgtatgttgattccacaaagaaaaaaaaaattgttctacatcctccaacctaaaagactgagtgtattgttattatctgctatgaagtatcctactgaggtaggataaaatgatgttggtacaaagaatgtgatttgtttatagttataagaaaacgttgaattttttttagcaaaacattatgtctgtgacacattcttaataaaactgtagcaaaatgtaattccagcaattagtgtgaattctactaaaaacaaaacaaaacaaaaaaaaccatggtattctggtttttctgaccaagctctccactctaataactgttacctcttcaatttcaaaaataagcctatttttcatcaatctctgctataaaacagctattgccattcagtagagaaagtggcaaccatttcccctgcactattcccatcacataatcagtcactaataacttattactctcctctcataaaaattccagtgtcctgaggtcttggcctgctcaatgcaggtagagccttacttccctaaaacccatggtgtctttctctcagaaaagcaccctgaacacaatcagtatgatgattgatatcatagttttacattattttctgccccaaaaccatggtctctcaattgagagaatatttaattttacaaggcagagtcctccttcttcaataaacatggataaaaatgatcctcatgtaatgaagtaagcctttccatactgtggttctttcccagataggcaccacgaaaggtgcttaaggatgcaaaatagccacagatccatagttcaggttgaaagtcacaaacagtagcctttttgagaaacctcaaacaatggaataaaagattttataacctgaaggtaagtagccatttccaaatgtcctttgacctttgaaatatataatgtcttaagttttaccatattggaacgtgtaattattgtgcagtttatcattttaaaagtgaatcaaagaactagagactgagtcactctttgtatgaatcctcacctacagttacagtcttagagtaagagcttcaggatgctcttacacattacatttgtgtggttccatcaaatacgtagattttaatgcctgcaaagctgtgaggcctgaataaagcctctgtcacacacagtacatttatgtgatttctcattattatggactcttggatgtctattaatacttgaactcatgaggagtttgccacagtcattgcattttttttttttcctttaagatggagttttgctctttttgcccaggatggagtgcattggcacgatcttggctcactgcaacctccgcctcctgggttcaagtgattctcctgcctcagcctcctatatagctgggattacaggcgcacgccaccaggcctagctaattgtgtacttttagtagaaatggggtttcgccatgttggtcaggctggtcttgaactcctgacctcaggtgatccacctgcctcggactcccaaagtgttgggattacaggcatgagccactgcacccagccagtcattgcattttcaaggaatctctcaggcataaattctctgacgttgtcaaaggaatgaattctaactgcaaaagttaccaccttcatttgtaaggtttctctccactatgaattctgtgatggcttgcaaggtttgaactctgactttagaactttccacacgttacatttgtaaggtttcccaccagtatggattgtctgatgggtagttaggcttgaacagatactaaagggtttcccacactcatatggtttctctccggtatgaattctctgatgccttgcaagttttgaagtttgactaaaggctttgccacactcattacacttgtaaggtttctctccagtatgaattccccgatgtcttgcaaggtgtgaattctgagtgaagaccttcccacactcattgcatttgtaaggtttttttccagtatggattgcctgatgggtagttaggcttgaacggacactaaaggctttcccacactgattacactcatatggtttctctccagtatgaactctctgatgccttgcaagctttgatgtttgactaaaggctttgccacattcattacactggtaaggtttacctccagtatgaactctccgatgtcttgcaaggtgtgaattctgagtgaagaccttgccacactcattacatttgtaaggtttttcaccagtatggatgacctgatgggtagttaggtttgaatgttcactaaaggctttgccatactcattatacttgtaaggtttctctccagtatgaattcgctgatgccttgaaaggtatgaattatgcctaaagaccttgccacattcattacatttataaggtttctctccagtatgaattccccgatgtcttgcaaggtgtgaattctgagtgaagaccttgccacactcattacatttgtaaggtttttctccagtatggatgacctgatgggtagttaggcttgaatacacactgaaggctttgccgcactcattacacatataaggcttcactccagtatgaattctttgatgatttgcaaggtgtgaattttgagtgaagaccttgccacattcattacatttgtaaggcttttctccagtatggatgacctgatgggtagttaggtttgaatgtgctctaaaggctttgccacactcattacacttataaggtttctctccagtatgaattagctgatgccttgcaaggtgtgaattacgcctaaagaccttgccgcattcatgacatttgtaaggcttttctccggtgtgaattaccagatgaatagctaggcttgaacgaacaccaaaggctttgccgcactcattacacttgtaaggtttctctccagtgtgaattctccagtgatttgtaaggtgtgaattttgagtgaagaccttgccacattcattacatttgtaaggtttttctccactgtgggttgcctgatggatagctaagcttgaacgagctctaaaggctttcccacactcattacacttgtaaggtttctctccagtatgaattcctcgatgtcttacaaggtgtgaattctgagtgaagaccttgccacattcgttacatttataaggtttctctccagtgtgaattttctgatgttgtgagagttgtgaatttcgactaaagaccttaccacactcattacatttgtaacgtttttcgccagtatggatcacctgatgggtagttaggtttgaacgtgttctaaaggctttgccacactcataacatttgtaaggtttctctttagtatgacttctctgatgacttgcaaggtgtgaattttgaggaaagaccatgccacatccattagatttgtaagggcttccccaattatttgctttttgcccctgtgtgagtaataaagaagagataaaatctttgagatatttcttagaaatgtgggttttgacattataaggcatttgttgaggtggtgaaactgaggaattattgttgaaagacttctcaacctgattacattcataaattttcccttcatattgaaaaagctgcagttcaggcagatgtgactgaaggcttaatccaagctgatttttaataagcttgtttcttgcatctcttttatcatgttcatctcttccatgagtgagattgccttcttgggtcaaaagcactcctttgtaatttccttcagcatctctgcattgatactcaaggccatgtgtatttttctggacttccctgaaggaacatccttcaatgtcttggctttcctgtctttccaacatcactgtttggaatacttctcctgtattactcttccctttgtgtagtaaatctttcattacaaattcggaagagagagctacaagatataaagatccataggtttccaattaattgtagtacgtaaacaagtattttacaccgaaaaacaatattacaccgaaaaacaatattaaaccaaaagcaattcttatattaaacagatttatgaaacttcagaacaataatattcaatttttaggaacacaaaggaaagaggattgtttaataaagttgattccatgtaattcaaattaatagtatggaagcctagttcccaacctacaatactgtagccagcaaagcaatcgttcagtcataaaggagagaaagtcttccccagacaaacaaagctaagggaatttaccatgatcagacctgttttacaagaaatgataaagggagttcttcaaatccaaagaaaatgacacgatgtaactgttacactaatattaatatcataatcatggtgtgcaaaccatttgtatatttactaagagggctaaaagataaaactattaaaaataagcacaacagtttgttaagtgataggcagtacacaacataaattgcgacataaaaaattcaaaatgcagggtgagaagggaacgaacatgcacagaggttttagtttctttttttgcaatcaaagttagttgatattgatttgagataaattgttaaaagctataggatgtttttatatttatttatttattttttattatactttaagttttagggtacatgtgcacaatgtgcaggttagttacatatgtatatatgtgccatgttggtgtgctgcacccattaactcgtcatttaacattaggtatatctcctaatgctatccctcccccctccccccaccccacaacagtccccagagtgtgatgttccccttcctgtgtccatgtgttctcattgttcaattcccacctgtgagtgagaacatgcggtgtttggttttttgtccttgcgatagtttgctgagaatgatggtttccagcttcatccatgtccctaaaaaggacatgaactcatcattttttatggctgcatagtattccatggtgtatatgtgccacgttttcttaatccagtctatcattgttggacatttgggttggttccaagtctttgccattgtgaatagtgccacaataaacatacgtgtgcatgtgtctttatagcagcatgatttataatcctttgggtatatacccagtaatgggattgctgggtcaagtggtatttctagttctagatccctgaggaatcgccacactgacttccacaatggttgaactagtttacagtcccaccaacagtgtaaaagtgttcctatttctccacatcctctccagcacctgttgtttcctgactttttaatgatcgccattctaactggtgtgagacgtaagccttattttatggtcaccacaaagtaaaagcctgtaatagacatattaataataaaaagcaatgaattaaaacatactgccgttttgttacttcttttctaattgttttctaacttctctcttgctttctttcttactgtcttcctttgtgtttaagtgatttctctggtagtataagtccttacctatcaataataacattaaatagaaatggactaaattttccaattacaagagagaggcctgctgaatggattataaaacatacagctaactatatgttgcctacaacaaactcacttcacctataaggatacatgtagacaaaaagtgaggggatggaaaaagatatttcatggaactagaaatcaaaaaagagcagtagtaggtatacttagataaaatagactttaagtcaataagtgtaaaaagagacaaagtcagtatataatgagaaaaggatcaacttagcaaaaggacataataaataagtacacacccaaatatgtaaagctaatgttaataaatctaaagggagagacaggtagcaatacaataatattaggggacttcaaaacacaatttttggtaatgaataggtcatccaggcagaaaaccaataaaaaaaaaattagagttaaaatatactgcagactaaatggacctaaaaaaagactttttaaattttttttctattttaaacagatgggatctccctatgttgcccaggctgtggtccattgcctagtcacaggtgagttcacagtgcactgcagccttgaacttctggccttaagcattcctctctcctcagcctcccaagtagctaaaattacaggtatgttccatgccctaacagacgtttacagaccattttatccagctgttgcaaaatacatattcttctcatcagcacatggattatgcttcaggatagattatatgttaagacaccaaacaagtctcaataaattcaaaaaagtcaaaattgtatctagtatcttttctgaccacaataaaataacactagaaaccaacaagaagagcctcagaagatacacaaacatggctgggcgtgatggctcacacctgtaatcccagcacttagggaggccaaagttgggcagatcacctggcgtcaggagttcaagaccagcctggccaacatggtgaaaccctgtttctactaaaaacacaaaaattagccaggcgtggtggcacacgcctataatcctagctactcgggaggctgaggcaggagaattgcttgatcccaggaggtggaggatgcagtgagccaagattgtgccatgcactccagcctgggtgacagagcaagagtctgtctagaaaaaaaaaaaaaaaagaagatacaaaaacacatggaaattagacaacatattcctgaacagccactgagttaatgaagaaattaagaaggaaataaaacatttctttttttttttttttgagatagggtcttgctctgtcacctacactggagtgcaatggtgtgatctcagcccactgcaacctccacttcctgggctcaagtgatccacccacctcagccccccaagtagcagagaccacaggcacacaccaccatgcccagctaatttttgtatattttaccaagacagagtttggacatgttgctcaggcaggtctcaaactcctgagctcaagcaatccgcctgcctcagcctcctaaggtgctgggattccaggcatgagccaccatgcctggctaaaaatttcctgaaacaaattaaaatgcaaaacagcacaatctataggatacagaaaaagcagcaaaaagaggaaagtttgtagcaataaacacctatatcaaaaaaacagtaagtcaacaaataaaacacctaatgatacaactcaaggaactagaaaagcaagaacaaaccaaacccaaaagtagtagagggaaaggaataataaagatcacagtagaactaaccaaaataaagactaaaaaaaaatctaagatcaataaaatgaaaagtaggattaaaaaaaaatttttttttttttgagatggagttttgctcttgttgcctgggctggaatgcagtggcatgataccagctcaccataacctctgcctcccaagttcgagagattcccctgcctcagcctcccgagtagctgggattacaggcatgtgcccccacgcccggctaattttgtatttttagtagagatggggtttctccatgttggtcaggccggtcttgaattcccaacctcaggtggtccacccaccttagtctcccaaagtgctgggattacaggtgtgagccaccgtgcccggcctaaaaaaatttttttttagagatggggtctatctctctcacacaggctggagtgcagtggcccagtcataactcactgcagccttgaactcctgggtttaactgatcctcctccctcagcctcccaagtagctgggactacagaaacgcactaccatgcttggctaattttcgttttatttttagagatggggtctctttctatgttgcccaggctggtttgaactccccgcctcaagcaattctcctttctcagtctcccaagttcctgggattacaggcatgaggcaccatgcctagcttgaaaagtaggtttttctaaaagataagcaacatcaacaaacttttagctaaactgaaataaaaggtggggggaggtacacccaaattaataaaatcagagacaaaacagaaaacattagaactgataccatagatacacaaaggaccattagggacaattatgaacaactacatacaaatttaaaaacctagaagaaagggatacatttctggacacatacaacctatcaagattgaaacatgaagaaatagaaaacctgaagacactaataacaaaattgaagctgaaaaaaaaaaaatttcatgtagaagaaaagcccaggattgaatggattcactgctgaattataccaaacacttgaagaagaactaatactggctaggcatgttagctcacgcctgtaatcccaacagtttgggaggctaagatgggaggactgcttgatgccagaagtttgagagcagcctgggaaacacagcaagacctcggctctactaaaaaataaaaaaggatttggccaggcacggtggctcacgcctgtaatcccagcactttgggtggttgaggcaggtggatcacctgaggtaaggagttcaagaccagcctggccaacatggtgaaaccccaactctactaaaaatacaaaaatcagccaagtgtggtggcacacgcctgtaatcccagctacttgggaggcagaggcaggagaatcatttgaacctgggaggcagaggttgcagtgagccaagattacgccactgcattccagcctggacaagagaacgagactgcatctcaaaaacaaacaaacaaacaaacaaaaaaacacaattagttgggcgtggtagtgtgtgcctgtaaccccagctactggggaggatgtggagggagggtcagttgagcccaagagtctgagtttgcagtaagctatgattgtgccactgaactccagtctgggtgagatagagagagagagactatctcaaataataataataataataataaagaaagaaaagaaaaaataaagaatactaattctactcaaaccatttcaaaaattgaaggcagcacatatttccaaactcattttatcagaccagcattaccctgataccaaaaagcagacaaggacaccacaacaaaaagaaaactataggccactacccctgatgaatatacatgcaaaaatccttgacaaaatagaattcaacaacacattaaaaagacattcaccatgatcaagtgggatctattccaggaatgcaaggatagtttaatacacacaaatcaattaatgtgattcatcacatcaacagaatcaaagacaagaagcatattatcatttcaatagatgctgggaaatgactcaataaaatcattatctcttcctaataaaaagtctcaacaacttgggtacagaaaaaacatacctaagcatgataaaagccatatatgacaaatccagcaggaatgtactaaataagaaaaaactgaaagcctttctgctaagatctgaaagacaaggatgtccactttcactacttctattcaacatagcattgatgttctagccaaagcaattaggcaagagaaagaaataaaaagcatacagattgaaaaggaagaagtcaaaatatacttctttgcagatgacatgattttatatttagaaaaacctaacaactccactaaaacactcttaaaatttagctaactatatagaatttggatctgtaagactgagaactgggcatcagatagaatcaactacagaaggaaacaccaaaggagatgaaataacccttttgtaacagccctccctgtgccacacggagtcaaggaaccagagttctcagaagctagaaaacagtgttgtccatcatgataaagactttgcctttgtctgagctgcagcaccactggaaggtgaaaggataaactagtacaagtctaaaggatagacaaaagggggcaaataaagatttctgttctgaggtcacagaattcaaacttgttttcccacagaactctcagatttgcatagagtttcccaaacactatttaataaacggcattttctctacccatctgaactcttacctgtgatcacagctttgatccattcccatccatctgggtttcctgctatttgtacttggctctccaaagtgaaaggctccttcccttgctccaacatagagataatactgaggtcaaaacaagagattcctgcttatgaaaagaaaggaaaacaatgggctgtagattttccagagtcccagtcctatgtttacatgaggagggaggactttacagctgtatctaaaaaaacacttcaaaaattcatccactaaatgcttctttataaattgttaggaaacactataatatgcaaatatatagctctcatcccaaaaccactgaatcaaagcatggggatagaaaacagggaattggatattttaaaagtcctgaaaccctccagtgacatcaggaagaggaaaattaaaatccagtttccacattatggagattttcatttttcagtcaacacagcttcagtctcagccaagcaatgcatgagctcccaggagagccacatggaaaatgaaaagatacacaggggcagatcctgacttctggaagaaagtcatcctcacccagggaggccaggttcctataattctccaacatcacgtccctgtacaaagtcctctgagcggggtccaggcatgtccactcctcctgagagaattctatagccacatccctgaatgtcacctgtccctaaaatgaaaaacacatccaccagggggatataaggaaaagctccaatcttcacataaaatgagaagacagaatagattaaactggagtaagtgggccgatatccaagttgtgatataataaaatatacatatggtcttcatccccctttcctgacatacatctcacttggaatctctggagtgataagtgcctttgtaagctaatgagatgactggtggctggaggccccaagatagtttcagaatggcggggtggtcaccagaaagaccaaggctggattacagagttgggacttcgagccccatcccccaacttaccctgaggggatgggggctgaaggctcggctgatcaccagtagccaaagatgtaagcaatcgtgcccacttaatgaagcccccataataacccgaaaggacagggcctgaacaagcttcaggatagggaaacacacggaggctctgaggacgcccccaccgacccccaccaaagacagcactcagcctcccaagtagttgggattacaggcatgcaccaccacgccatgctccttctcccataccttacccaatagactgcttacatctggctgttcatctgtatactctgtaatatcctatataataaatgggtcaatataaataaagtgtttccctgatttctctgagccattctagcaaattaatcaaacctgaggagggggtcatgggaattcatgatgtataagccagtcagtgagaagcagagaccatctgtgtttgcaactggcattgaagtgggcacactcttgttggattgagccctcaacctgtgggatctgatgctatgtccaggtagacagtgtcagaattgaactgaataggaggtcactcagctggtgtccagtgcagaattgctcccttggtgtgtgtgggaaaacccaggacatctgggatcacagatgtgttttccgttgtgagagtacagtaggagaaactgggtctgttttcaccacatcctcacacacacaggtatttttgggcagaatgtttccttaattctgtcttcttatactcttctataagaggttatgatagtctttaaatcagtgttgatttctcagttttgtagacaatacaaaaaatacacaaatatacaaataaaaaaccaacaccgggttatctttattgaagtgctatatattatgtctaacacaccaagtgatattcagtatttagatgatctagagcatgagtgatgtcttacgagatgaaaatgtgtacagtgactttaaagaaaggtcagaatctaaaaactgtgatcatcgcaataacaatgacagatgtttctgagcacttcccaagtgcaaggcattattctatttatttatttacttacttacttatttttttgagacagagtcgctctatcacccaggctggagtgcagtggcatgatctcagttcactgcaacctctgcctcctgggttgaagcgattctccggcctcagcctcccaagtagctggaattacaagcacccaccaccacacccggctaatttttgtatttttagtagagatggggtttcaccatgttgaccaggctagtctcaaactcctgacctcagatgatccacccgccttggcctcctaaagtgctgggattacaggcgcaagccactgtgctcagtctggcattattctaaataaatgtcctgcatgtactaacttgtatatgaatatgatagcccatgagagaaagatctgttcccatcttactagcagataaatgtatatgacagacactctaagaaacttgcgtcaagacaaagagctaaaatgtcagagcaagcatctgaatccaggtgtctgggaataagaattaaacctaaagaatcaaatagttggccaggcgtggtggctcatgcctataatcccagcactttggaaggtcgaggcaggcagatcacgaggtcaggagatcaagaccatcctggctaacatggtgaaactccgtctctactaaaaaaatacaaaaaaattagccaggcatggtggcgggcacctgtagtctcagctactcaggaggctgaggcaggagaatggcatgaacccaggaggcggagcttgcagtgaaccgagactgtgccactgcactccagcctggatgacagagcaagactgtctaaaaaaaaaaaaaaaaaaaaaaatcaaatagttaagtaaaagaacatgaaaaggatctaaatgagcaaagttgaaacaagttcatgaataacaacatggaacttcataaaaggtaattacatatatacacacatctatttatgcccataatatgtaactattcttactattaaatcattaatgtgatagctgagaacaaatttaaggacacagaaaatatttaagatacaatttgaattgctaaaaaacacaaaacttatttaaaatcatgatgtgtgggctgggtgcagtggctcacacctgtaatcccagcacttcgggaggccgaggagggcggatcacgaggtcaggagttcgagaccagcctgaccaacatggtgaaacaccatctctactaaaaatacagaaattagccgggtgtggtggtggacatctgtaattccagctactcaggagggtgaggcaggagaatcgcttgaacccgggaggcagagattgcagtgagccgagattgcaccactgcactccagcctgggtgacagagtgagactctgtctcaaaaaaaaaaaaaaaaaaatcatgatgtgtgcttaataaaaaaacacgcactcacgtcacatatacacagtttagtaataacaacagtgaaaaggtaaaacatccactctgtcctcattcagagaaggctccaataaagatgtagaatgagctatacatctttcctaacatgaaaacatgtaaattttcaaaatttgcaggctaaaatgtcacaacaaaacattcactgaagggccgggcatggtggctcacgcctgtaatcccagcgttttgggaggccaaggtgggctgatcacttcaggtcaaaagtttgggaccagcctggccaacatggtgaaaccttgtctctactaaaaatataaaaactagctgggcatggtggcatgcaactgtagtcccagctactttggaggctaaggcgaaagaattgcttgaatccgggaggtagaggttgcagtgagccgagattgcaccactccagcctgggcaacagagtgagactctgtctcaaaataaataaatacaataaatagaatatttaataattggtaaaacaggccgggcgcagtggctcacgcctgtaatcccagcactttgggaggccgaggcaggtggatcacgaggtcaggagttcgagaccatcctggctaacacagtgaaaccccgtctctattaaaaatacaaaaaattagccgggcatggtggcgggcgcctgtagtcccagttacttgggaggctgaggcaggagaatggcgtgaaagcaggaggcggagcttgcattgggctgagatcatgccactgcactccagcctgggcgacagagcaagactccgtctcaaaaaaaataaaataaaaataataattggcaaaacaagaacgtggttctaccctctctaatgggaaagaagttctgctcctataaccgaacaaaataataaccactctcacctagcaccagttgcacaagggtccctgcagaaacaccagtctccattgtatgggttttctgaaaatagttcaatgattctcctgcattttccatttaggttgatttcatgtattaaaatagatgatgggatgaaagaaccctctgtcactgatgtctgtcagtctaaaattcccattccattcccagtcattaataagagtttggggttagaaacacagtgactcacttggtgagcttcaaatgtaatgtaaatgagccagaaaaatttccccttattagccttattttacataatttagcaagtatttgtgcacattaacacgtgacttccacgtgcagctgctctaatcctgctccacagagagctgacagtgcatccagatgtggcccctgaacaatccctgctgcccaacagcactgacaccacaggaccctcaccccgtctccatccatgtctgggtgtgagcccttcccaggaccatgcccagtgcagcctcttcccaagctcatgtcactgggtcacgagagatggaatctaagtgagatgagagggactgagggaaggcacgcgtaagtgcgagcaaacctgtcaggcaggacgcttcagactcagagaagattcccaacttcaaagaatgacatttcaagaagaaataagagacagaacaatccactgataatattaccttacctgggtgagagccatgcctgacttgtctttctttcctcttcctcttcttcaagggttcttccttaggtaacaggaaagtgcctttagaagtcaatattgaatatccaaaatgtgctgtttattgctcagaatcaacacatccccttcctatgccacaatcacacacacacacagggaagacctcaccctgtggaaagatggtctcagctgcccactgcaccagggcaatgcagggacaagaagctcctatgggaagatcaataagtgagtttctgacccctttcttcagaacccactctcctcctggagaagcccacacacacgctgcagcaattgggagctgggctggactgagctcccccattcagggcacagaccaagccctgaccaaaccccatgcagagaacagcctccctcacctctctgtggattgcaggccaatctcaggcctcagaaacaaaaggtagaggctgaacgtggtggctcacactataatcctagcactttgggaggctgaggcagaaagatcagttgaggccaggagttcaagaccagcctaaacaacatagtgagaccccatttctcttaaaaaaaaaaagtaataaatttagccaggcacggtcactcacgtcttgtaacctcagcactttgggaggcctagatgctggatctagagttcacaggagaggcctgcaggtgacatgaagctgtgcaggtggggttgaaagccatgagctgagttgataaggaaaggcaatgagtgcggacagagaaaaaagtggctggaggactaagcccacgttcagagaacagaaagttctggagacacaagaagaggaaagcataatgtgattagggaggcaacaagaaaattacaacaaatagatgtgtaaagcttaacgggatgtcctaaaagccaagaaaatagaagagaaagtgagcaactgtgccacatgctactgataggaatggaaagatgacaggaaattaaacattgaatttcaaatggatccatcactggtaaatgaaaaagaaaggatcagtggaatgttgggtatgagagcttgattcaagcaagagttcaagcaaggactgaaggcaagaattgaacataaagtaaaaaaaaaaaaaattgtagtgtattgtgctcttaaacggagcatagaagagtacttactacagactgaaaggtagtttagagttttgttttgtttttttttttgagatgaagtctcactcttgtcacccaggctggagtgcaatgttgcgatctcggctcaccgtaacctccgcctcccaggttcaagcgattctcctgcctcaacctccagagtagctgggatcacaggcgcgtgccactatgcctggctaatttttgtatttttagtagagacagtgtttcaccatgttggccaggctggtctcgaactcctgacctcaagggatccacctgccttggcctctcaaagtgctgggattacagccgtcagccaccgtgcctggccaatttagagtattttttgttttaaagatggagcgtagaagaaaaaaagactttattctgtgtgtgtgtgtgtgtgtgtgtgtgtgtgtgtgtgtgtgtttgttttttgtttttgagacagggtctcactctgttgcccaggctagagtgtgacagcatgaacatggcttactgcagcctcaagctctcgtgttcaagcgattctctcacctcagccttgcaagtagctgggagcgcaggtgcaagccaccacatccagcttatttttttctatttttcgtagagacggagtcttgctatgttgcccaggctggtctcgaactcctggactcaagcaatcctcccaccttggcctctgaaagtgttgtgattacaggtgtaagccgctgtgcccagccctgtgtacgtgtcttaatggagaacaccactccctaggtacagggatgaattcccttgaagttaaaattttgaaagctttacagattgtgaaggaaaaaaaaagttaaaattgatggcacgcatattgtcctgagactgtgagtgaggctggtacatggtacacaattgcagggccagcagcagccagaagcaggaacaggccattcccagtcactactgagtagagatcacaggtcctgacaggtgggtgggccacttggaggtcttttcctttagtctttgagataggaaaaaacccaactctacattctgctctcacactaaacacagaatacttcacctctagtcaccaaaatgtgtgtgtggcttttcccacaatgaccaggggactcccaggggactcccagctcgggggggggggggggttaggcgggggtcctacaatttcattcaactctgatattatctacaagacagcatgggccgggcacagtggctcatgcctgtagtcccagcactttgggaggccaaggcaggaggatcacttgaggccaggagttagagaccagcatggccaacatggcaaaacctcgtctctactaaaaatacaaaaattagctggatgtggtggtgcacacctgtaatcccagctacttgggaggctgaggcaggcaggagaatcgcttgaactcgggaggcagaggctgccttgagccaagattgcgccactgcactccagcctggacaacagagcgagactgtttcaaaaagaaaaaaaaaaaaagactgcatgacgaggtgctacaggttcagagctcagtctaaaactgcccctcacttcagacacagtatgccagtggtaactgtcacttatacttttgagtgacctgataaatactgtggttctcttaacccctcctcggctttgattaactttctaggacagctcttccttctgactgttcatctgtatcttctgtaatatccttcataacaaatgtgtaaactaagtgaagtgttttccctgagttctttgagccgccctcacaaattaatagaacctgaggtggtggggagggggatgtcaagggaatccccagtgtatagctggtcgctcagaagttcaggtaccaacgggagacttacaactggcacctgatgcgggggcaatttcgtggaactgagcctcaatcagtgggatctgatgctaactccaggtagagagtttcagaattgagttaaactatacgacactcagttagtgtctgatagagaacgggttgttggtgggagaaatccgcacacattttcgtgagtggaggcgagacactgtgtagaatgtgccctgttgtattgagtgtgacaggaaagaaaatcaaaggaaaaatattttttcctcttagttcatacactcgcccacaccctaccctattccaggaaaagggaagtgggtggactcaaaactaaatgagcgaagtcactgccctctggtttgaatagtgattgcaaatgaagctataccctaatactaataattgtcaaatgcacgtgttacgcattttacataaaggagtttcttccattctcatttgcaactgcataatttaagtaaacgtattttaaatgtgttgcattattttaaacccagaaaccaatgtcacaatgtcatcatcacatctaatcaacgcaccactcacctggactcagggtccctctcttgcttccatactgtgtgtttccctccctcatcctctacatagctctcattctcacattagcttattttttattttctgtgtttttcccctggttctttgcgcgtcgttctgagcccctctcatctcctgctatttctccccttcttcctccgcttgcacctgttctgtcccattctggggccttgtttcaactctgattcctctttctccccagtcttttcattgtccccagtctccatatatttctgcctctttcttctcccatctctgctccctctgttgaatctcctcttcccttctacacctcttgccccactctctggcacccccagatcccaggcctccccctgctgtggttctccttctgctctcctcgtcaccggctgtcccctcttgctgtcccagcaccacgctgcttgtctgccctggctccaaatccctcctcctctcccggactctgtctgaggagcctcccactttctggccctctccctaccttgctgtccttcatgtctctggacatcgagcttttctctacatttccccagttgcttttctccttctgccttctcagctccttctcttaccatctgcaaatccctcgcccatcctctactttgccatctggttacgggtttccctcactctttcctctcagtttttctacttctctctctgtctctgcccctttctctacctgctaatccccttggtccacacattcacaggaaggtttggactaagacgcctgcatcttggaggagcgcattttccaggggctggagctgggcaggcaagaacaccgggtgtcacaggacaggccccgggcacctccccagcgcgggctcaggagaagcggggactgcgaaggggaggcctggggagcagcagggcccggcacgaggaggagggaggtggcggggcgacggcgccttagaagaggggtggggtctgcaggatgccaggaccaggcagaggacgcggcctcgccggtaccggggctgaggagctgcgctccaggggccgacgagggcgaggctgggaggcacccagggcgggaatccacctcgcgggcgaggactttaaaaagcccggggcgggaggaggggtcaggaaagggttttaagcgggaggaagacgcgaaaggccggggacagggagaagcctcagagctacttcaacccaaagagaagcgactccgaacccacaccgcgagtcagctggggtggagggcgcggtgcggggatcttaaggtctgtagctgccgggcgcagtggctcacgcttgtaaccccagcactttgggaggccgaggcgggcggattacctgaggtcaggagttcgagatcagcctgggcaacacggtgaaaccccgtctctactaaaaatacaaaattagccgggcgtggtggcacatgcctgtaatcccagctactcgggaggctgaggcaggagaatcgcttgaacctgggaggcggaggatgcggtgagccgaaatcgcgccattgcactccagcctggacaacaagagtaaatctccgtctcaccaaaaaaaaaaaaaaagaaaaaaaaaaaggtctgtagcgagcccgggaactggctgcggaaacggggcacggcggttcgcaagtttaatccatactgagggacactcacgctcggcggcgtcacccgcacccaacacgatccgcttccggaactgcagaaaactgcgcgtgcgcggaaaagagcccgggcactctgggggcggggcctggggagaggcggggtctgcggacgaaacgctggggcggagctggggcggggtctgcgcttccctcagcctgcctagcccgcagtctcatttttcccggtttagaaacgctggagtgttcactatgtccccgggagcaccgttccaatttgaagcagttttaaggtgaaagaatagacttacgtggaccacttatgatagaaaccaaaatgatttcctcttaccaagttgaaaacggtttatgttaaaattgtttgccggcgggttggacccagtcctgctagggagtctgctgcagctcaggaacggggatctgggaatcggggatctcggtctgggaactgggatcttagtggaggatccacgaggcacggcgattggatccagcaattcctgcaattaaaatgtatttaatttaactaaaatgtctggaaattatctctgaggatgattcaaagtagaatgggaaatgcagcatcctacctggacggatatgcaatttaatgcagtagcccaacagaacctcctttacatttcaaatccccattctccccagtggaagagtcaagcctgtgctcaattcatgggaaggttaaggccgataagttagatcaccaagggctgctttattgttctttaaaacatatatttttgtaaagatgggagtctcggcccaggctggtctccaactcttgacctcaagcaatcctcctgcctgggcctccaaaattgctgggattacaggagtgaactactgtgcccagtcaactactgatttaaaccatgtgaatttttaaaaaatagagataaactgcattatttttgcttatattcgttattccgttccacacttgaaatgacttaaccacaaacaactttgacataatctttctttgcatcaaaatatgcttaaatcaataatttctaaatatcatgtaatttcaaattcactttatgggcattctgaagggaacttgacacagtactttttattttaaaattgtaatctatattgggtctatttttttgttttctgtttcttaatgttctatcagatgtggataacagagtgtggaaaatagtcaccacatgacaattggatttattttcgcctaaagaatagttttccagtatttctaacgtaccatcccagtacattgactgaactaaagactcacagggatacccttttttcatgtttatagagaacctagtttatacctgctattgtcttatgtacattttcatgtcacacaattttatctccaaacaacacccttatttatatacaccgtatagttttcactttaacaaaatattaaacgtttcatctgggttacaatatatgaaagaaaaaaataaaagggaaaatcatattaaaaaataaaaagtaattttactacaattgaacataaaccatgaaatatattgctcaataccataaactgaaaataacatttccatagcctttggagaaatgcccttccagtaaaactgcttaatcatatttattatgtaagaaacttttccacagattttcactgagttagtataaaaacatcttaggcattataactaaacaggatttcaaaaacattttcaacagttgtgttatttttaatgagtcctatgggtacagcggaagaataaatgtagaatattactatcaagaaaactagggcagggcgtggtggctcacacctgtaatcccagcactttgggaggcagaggcgggtggatcacttgaggtcaggagttcgagaccagcctggccaacatggtgaaactgtctctactaaaaatacaaaaattagccaggcgtggtggcacatgcctgtagtcccagctacttgggaggctgaggcaggagaatcacttgaacctgggaggtggaggttgcagtgagccgagatcacgccactgcattccagccccggtgacagagcaagcctccgtctcaaaaaacaaaacaaaacaaacaaacaaaaaagaaaactggggtcttcccaaaccaagaattcagaactttccagagtaaataattcagtgtactagcgtcagtctccattttgtgatgttgtactactaacgcttttacagctctgcacttctgttctgcccatttggtcaaactggtcatgcttgagtgcttcctcctttgtcactagatggacgttcaaaccacacaaagcttcctctaacccatccccacaccttatcaaccataacacaccaagcaagttgcttatctgggctctcaagccatttttagaccagctttggaagtctacccagctttccccagaaacccacattatgtaataaacagtctcataacacttctcaaccaacctttaggtgaagttcaatacagttccagtagagaggtcacaagttcaaatgatcaaaatgttatgagggtgaacatacaaactttgtcgtttatctgccaggaaaaaaaaaaatctgaatgtgttatgttctttcttaaaagaaaatttatatatattaatttttccaattgccactgagcattccaaaggtaaaaaagagatgttgttgtttttatccatattccccacagtttttttgtttcctaatatgtcatatttttactatacttgtattttcacttcaggtacatcaagataaatgccataggtgttatttggcatgcaagaaagagacatgcaaaaatataataatactgtgcatatgcatgaagagcaatgcagacttcagggtgtgagagtctgaaatatcctttctgtgggattttcattataccacataagtatcccaaggcagagtgtggagagaataattcaagtacaaaatacaattagtttctgggctgggcatggtggctcacacctgtaatcccagagctttgggggggccaaggcaggtggatcacttgaggtcaggagttcgagaccagcctggccaacatagtgaaaccctgtctctactaaaaatacaaaaactagccgggtgtggtaacgggcacctataatcccagctacttgggaggctgaggcaggagaattgcttgaacccgggagacagaggttgcagtgagccgagatcacgccactgcactccagcctgggtgacagaatgaaactccatctcaaacaaacaaacaaaaaaaccaaaatacacttagtttctgaaaattatatgttgtttgatccaacaatggaaatcattgttctagatccttcgatagcttaatggtgcagtgttgttatctgttatgaagtatgctactgaggtaggataaaactatgttggcaagaaatgattcattcatacttataaaatacatcaaattttattagttaaaacattaaatctatgatgcattcttaaatagtagcaaaatgtgattccagcagttaatgtaaatcctagtaacaaacatgggattctggttactttgattaaacttcttatgctcggccggccgggcacggtggctccagcccgtaatcccagcactttggcaggccaaggtgggcggattatgaggtcaggagttcgagaccagcctggcaaacatagtgaaactccatctctactaaaaatacaaacattagccaggcgtggtggtgcatgtctgtaatcccagctacttgggaggctgaggcaggagaatcgctaaaacccaggaggcggaggttgcggtgagctgagattgcatcactgcactccagcctgggcaacagaacaagactccatctcaaaaaaaaaaaaaaaaatcaatctttgctatgcaacagctattggcatttgatggagaaggtagcctccacttttctgcattatttgtaccacacatcagtccctaataagctattactctcctctaataaaaatccgagtgtcttcctggctctatttcatggtctactggtagagaatttctttctttctttttttgagtcagagtttcgctcttattgcccagactggagtgcagtggcatgatctcggctcaccacaacctctgcctcccgggttcaagcgagtctcctgcctcagcctcctgagtagctgggattacaggcatgcgccaccatgcctggctaattttgtatttttagtagagatggggtttctccatgttggtcaggctggtctcgaactcccgacctcaggtgatccacccaccttggcctcccaaagtgctggcattacaggcgtgagccactgtgcccggccagtagagaatttcttcccatacccacagtgctcttctgtcagaagaagggcacctgcagtgcaataaggatgatgagtgacatcatagttcatcatcctctgccctttccaagtgctctctaattcagactatatttaattttaaaaggcagagtcttttttcttcaggagcttggagagaaataatcctcacctaatgaagtgagtgagcccttccatcctttgattctttcccgaacaacaccatgttaggcgtataatcatgtataaaatcagcacattgcaaagttctggttggaagttataaatagtagccttttcaataaatcttaaatacttcaacaaaacattttataagctgaaagtaattggccatttccaaacatcctacaacctttgatatgtatcatgtaatgagttttaacacatttggacttctgattatgctgaagtatataatatcagagggttatgaggaaactagagactgagttctactcttcctatgaatcctcacctacagttgtggtccaggagtaatagtctcagcatgcatgttacgtttgtgtgacttcatcaaagatgtatcttttgatgcgtattgagctctgagacctggataaagcttctgtcatacatagtatattcacaggatttgaactctgatgtctgttaatgcttaaactcatcaggagtttgccacagtcactgtatttgtaagaattgtctcaagaatgaattctctgatgttgtgaaagaatttgtggctgaaaaactggccgcactcctttgtaaggttactttttttttttttttttttttggagatggagtttcactcctgttgcccaggctggagtgcaatggcatgatctcgctcactgcaacctccgcctcccaggttcaagtgattctcctgcctcagcctcccgagtagctgggattacaggcgtgcaccaccacacccagctaatttttgtatttttagtagagacagcgtttcaccgtgttggccagcctggtctcgaactcgagacctcaggtgatccccccgcctcggcctcccaaagtgctgggattacaggcgtgagccaccacgcccggcgtcctttgtaaggtttctatccactatgaattcttcgatgttttgcaaggtttgaattttgagtaaagaccttgccacattggttacatttgtaaggtttgtctccagtatggactgccatatgggtagttagggttgaacgaacactgaaggctttcccacactcattacacctataaggtttttctccagtgtgaattcttctatgatttgcaagatgtgaattttgagtgaagaccttgccacattcattacatttgtaaggtttttctccagtatggatgacctgatgggtagctaggtttgaatgtacactaaatgctttgccgcactcattacacttataaggtttctcaccagtgtgaattctctgatgaattgcaaggtacgaattgtgtctgaagaccttgccgcaatcattacatttgtatggtttttgtccagtatgtattgtctgatgtatagttaggcttgaatgaacactaaaggctttgccacactcattacacttgtaaggtttttctccagtatgaactctccaatgccttgcaagttgtgatgtttgactgaaggctttaccacattcatcacacttgtaaggtttctctccagaatgaattccccgatgacttgcaaggtgtgaattttgtgtgaagaccttaccgcagtcattacatttgtaaggcttttctccagtatgaattgcctgatgggtagttaggcttgatcgcacactaaaggctttgccacactcatcacacctgtaaggtttctctccagtatgaattcttcgatgatttgctaagtgtgaatactgagtgaaaaccttgacgcattcattacatttgaaaggcttttctccggtatggatgatctgatgcttagttaagtttgaatgcatactgaaggctttcccacactcattacacttgtaaggtttctcaccagtatgaattcgccgatgctttgcaaggtatgaattgtgcctgaagaccttgccacattcattacatttgtaaggtttttctccagtgtggattgtctgatgggtagtcaggcttgagcgaacactaaaggctttgccacactcattacacttgtaaggcttctccccagtatgaattcttcgatgacttgcaaggtgtgaattttgagtgaagcacttgccacattccttacatttgtaaggtttttctccagtatggatgacctgatgtgtagttagttttgaatgtgctctaaaggctttgccacactcattacacttgtaaggtttctctccagtatgaattctctgatgacctgcaaggtttgaaggttgactgaagacctttccacattcattacatttgtaaggtttttctccagtatggatgacctgatggattgttaggtttgaacgaacagtaaaggctttgccacacttattacactggtaaggcttctctccagtatgaattctcttatgacttgttagccgtgagttttgactgaagaccttgccacattcatcacatttataatgttttcctcgattattaggagacttctcaacttgattgtattcataaattttcccttcatgttgaaattgctgcagttcagggagatgtgactgaaagcttactccaagctgattttcaatatgcctgtttcctgcagcccttctatcacgttgagctcttctaccagggagattttctttttgcaacataagtactgttttataatttccttcatcatctttccactgacactcaaagtcgtatgtatttttctgaacttcctggaaggacaagcctacagtgtcacagctttcaagtctctccaacttcaccgtgtagaacgcttctcccatattgttcttcccctttggtggcaaatccgtgtttacacatttacaagagatatctgtaagatataaacaaccatagatttccagttaactatagtaggtaaataactatttcccattgaaaaacctaatgttacaccaaaagtaatagttatgttgaacagacttacgattcttcagaaccataattttccagaacacaaaaggaacaggattccttatcaaagaaaaggtggtaacatgtaattcaaatagtaggggatcctagttttaaacattctgtgaacaaaacactcatattgtgcaaacccatattagccctgaaaggagtatttttcaaccatgacccaaggctaccaattggcagtatattttatatggctgtcacagaattcaagagaaataattcttagattgtgcctatttaaagcatatttgttatgcataagtaaatgctgaagcacaacatgatatactctaatggcaaataactcacagcaaacatatgtaatgaataattaaagaactagtaattttgaattggaaaacaataatagcactgaaaaaacgaggaggaattcaattttaaaatgtcagaaaaaactatttttctgaatacctgttataaaactacatacccctatatacccacacagagcaaacattttgcaacattaacaagtggtatataacagttatatttctttctttctttctttcttttttttgagaaggacttttgctcttgttgcccaggctggagtgagtggtgcaatctcggctcaccgcaacctccgcctcccaggttcaagcgattctcctgcctcagcctcctgagtagctgggattacaggcatgcaccaccaggccagactaattttgtatttttagtagagacagggtttctccatgttggtcaggctggtctcgaactcccgacctcaggtgatccccccgcctcagcctcccaaagtgctggtattacaggagtgagccactgcgcccagccccaacagttgtatttcttacaaatggtaaaaaaccatcctctatcaataataatcgaaattaagaaaatattttagcaactcaggatataagcagtaggcaagaattagtaaccgtgtttacaggaagttatagtctgtggattgtcaacaatttctctctctttttttttggagacagagtctcgctttgtcacccaggcagtggcgcgatctcggctcactgcaagctccgcctcccgggttcccgccattctcctgcctcagcctcccgagtagctgggactacaggcgcccgccaccgcgcccggctaattttttgtatttttagtagagacggggtttcaccgtgttagccaggatggtctcgatttcctgacctcgtgatccacccacctcagcctcctaaagtgctgggattacaggcgtaagccagggtgcttggccaacaatttctcttgagaaaagaggagtctgccgggcgccggtggctcccgcctgtaatcccagcactttgggaggccgaggcgggtggatcacgaggtcaggagatcgagaccatcctggctaacacgatgaaaccccgtctctactaaagatacaaaaaattcgccatgcgttgtggcgggcgcctgcagtcccagctactcgggaggctgaggcaggagaatggcgtgaatccaggaggtggagcttgcagtgagccgagattgtgccattgcactccagcctgggcgacacagcctgactccctctcaaaaaaaaaaaaaaaaaaaaaaaaaaagaaagaaagaaagaaaagaggagttctacttcagaaccagcacaggatataagaactggaatataatttttttttatgaaataaaactgtctttatttgcagataacataatcatccttgagaaaattcaatatactctacaaaaatgctgctagaactagtgagtttagcaaggttgaagaatacattatcaataccccaaagaatcaattttatttctatatactagcaatgaataatcagaaagttttctaaaatgcagtttgcaatagctttaaaaacattaaatacttagagaaaagtccgacagcagatatgaagaacctatacactaaaaactataaaatattgcagagaggaattaaagaagacctaaataaatgaaaagctaaatatatcttgttcagcatttagaagactcaatattgttaaaacagcaacactccccatttagcctattgattcaacacaatcccaaccaaaattccagcatgtattttttgagaaattaacaggctttctaaaattcataggaaaatggaaaggatctagcataattaaaacaattttgataaagaagaaagttgtaacactatcactacctgctttcattataaaagtgtagtcatcaagacagtgtgattattgttgattagacaaatatcaaatagatcaatggaatgaaatagagaatactgaaatagactcacgttatatagacaactgatttttgacaaagaataaatggcaattccatggagaaaagacagtctttttaaaaaatggtgctgaaacaattagatcttcatatgcaaaaaaacccttttgtttatacctcattccatatagaaaaatatactcaaatagatcagatgaaaacctaatgtaaaatctaaaccataaaacttttagaaaaccaacatgaggaaaaatctgtggagccctcggatcaagcaaagatttcctagatatgataccacaatcatgatccataaaagaaaaaaaagaattaatttataaagacacactgttaaaagaatgaagactcggactgagggaaaatattcacaaagcacaaatctgataaagactttgtatctggaatatacaaagaactctcaaagttcaatattaagaaaacaaaaagcccaattttaaacattggaaaatgatttgaacatacactgcacaaaagaaaatattaatatatatagataataagcacattaaaagatattcaacatcatagtcattaggaaaatacaaattaaactactaaatgttgattagaaaggctggaatttaaaactagcaataccaagtgttaacaaggatgtgaaaaaactaaaattctcacacactggtagtgggaatgtaaaaggctacaaccactttggaaaataggttggatggctttaaaaaaaatttttttaatggaaatatttctttttttattattattactatactttaagttttagggtacatgtgcataatgtgcaggttagttacatatgtatacatgtgccatgctggtgtgctgcacccattaacttgtcatttagcattaggtgtatctcctaaagcctatccctcccccttccccccaccccacaacagtccccagagtgtgatgttccccttcctgtgtccatgtgttcttattgttcaattcccacctatgagtgagaatatgcggtgtttggttttttgttcttgcaatagtttactgagaatgatgatttccaatttcatccatgtccctacaaaggacatgaactcatcattttttatggctgcatagtattccatggtgtatatgtgccacattttcttaatccagtctatcattgttggacatttgggttggttccaagtctttgctattgtgaatagtgccgcaataaacatacgtgtgcgtgtgtctttatagcagcatgatttatagtcctttgggtataaacccagtaatgggatggctgggtcaaatggtatttctagttctagatccctgaggaatcgccacactgacttccacaatggttgaactagtttacagtcccaccaacagtgtaaaagtgttcctatttctccacatcctctccagcacctgttgtttcctgactttttaatgattgccattctaactggtgtgaggaatggaatataacttttttaaaaaaaacttttattgtataatggcaaactacaggtgtatatatttatggggaaaaaatgatgtcatgatgcatatatagaatgtggaatgatggaatcacgcttattaccacatccatcatgtgaaaaatgtgtcatttactcttgtttaattgaacctttgtgttgaaacgacaaacatcttcctaatctccccaaccccaccctcttgtaaccaacgttcttctttctatgagttcaagaggtttggattccacatataggtaagaaggtgcagtacttgtatttctgtgcctagattatttcatttagcaaaatatcctcggggtccatccatgttctggcagacagaacttccttcttttaaaggctacacagtgttccatcattttctttatccattcatctgttaatgaacacgtagtttgatttcataactcgactattgtgaacaatgctgcattaaacatggaatgcagatacgtcatagatatgctgatttaaatcctttggatctatacttgacccttggacaatgtaggggttaagaatgccaaccctccactcagttgaaaatctgtgtataacttttgactccccaaaaacttaaccactaatagcctacgattgactggaagctttactaataaacatataatgtcgattagaatgtatcttgtattttttatgttatatgtattatatactgtattccttttttgtttgtttgtttgtttgttttcgagacggagtcttgctctgtcaccaggctggagtgcagtggcacaatctcacctcactgcaacctccacctcccgggttgaagcaattttcctgcctcagcctcccaagtagctgggattacaggtgcccaccattaggcccagctaattttttatatttttagtagagacggggtttcaccatgttggccaggctggtctcgaactcctggcctcacatgatctgcctaccttggcctcccaaaatgctgggattacaggcttgagccaccgcatgcggcaagagatcactttttattatgatatgcaatttactggagagatgaactacttaaagatgattagcgttacagagtgtattaagcaaatacttgcaacacttgagctccatgtaatagcaataggaggtggctatgaaattgtatggcagtacactatgtactaaaattagttctatacaattatgattattatatctttacatttgtgtgtgtgtgtgtgtatatatatatatatatatattttttttttttttttctttttttagacggagtctcactgtgtcacccaggctggagtgcagtggcgtgattttggctcactgcaacctccgcctcccaggttcaaacaattctctgcctcagcctcccgagtagctgggattacaggtgcctgccaccacgcccagctgatttttgtactgtatgtcacatgcagtaagtgtgtgtataagttttaattttttatgatagatttgtgtttttattttgaaagagagtctcattctgatgcccaagctagagggcagtggtgtgatctcggctcactgcaacttctgtttccctggttcaagtgattctccagcctctgcctcccacctagctgggattacaggcatgtgccaccacacccagctactttttgtatgtttagtagaaacagggtttcaccatgttggccagctggtctcgaactcctgacctcaggtgatccacacaccttggcctcccaaagtgctgggattacaggtgtgagccaccacacccggccagatttgtgtattttttatggtggtaaataatagagtaataatttatgcattcatgacatacctaattttttcttaatttttataatatttttaggttatgcaatttgtctgctttttcaaattgttggaaatgtctttaaaaatttccaatatatttactggaataaaacccatatataagatgacccatggaattcaaacctgtgctgttcaagggccaactgtatacccagaagtgggattgctggataatatagtacttttatttttatttttttgagaaatttccacataatttttcataatgcctggactaatttacattcaaccaatagtgtatgagaacccccagtctccatatctttgctaacacatatcttttgtcctcctgacagtagccattctgacaactacgtgatattttatgctgctttaaatttttatctctgcaagtagtgatgttggctgtttgtctgccttccttcaagaactgtatattgaggctcatacctgtaatctcagcactttgggaggccaaggtggatggatcatgtgagaccaggggtttgagaccagcctggccaatgtggtgaaaccctgtctctaccaaaaacgcaaaaattagtcaggcgtggtggtgcacgcctgtagtcccagctacttgggaggctgaggcaggagaatcacttgaacctgggaggcggagattgcagtgagccaagatcacgccactgcactccagcctgggtgacagagcgagattctgtctcaaaaaaaaaaaaaaaaaaaaaaggaaataaaatgtatattgagatcccttggccattttttaaattggtttgttttcatgctattgagtagtttcgatttctcacacattttggacattaaattggtgtcaaatatacaaattgcaaatactttctcacaatccgtaggttgtctcttcattatgttaattgttccctttgcagtgcagaagcattttcagtagatgctaccccatttatctgtttgcttttgttgcacaagcttctgggctcaaggccaaaaaatcattgataacgtcatgtaggttttcccctatgattacttctagtagttttacattatcaggtcttacgtttaagtatttaatacattttgaatcaattttggtatctggtgtgagattaacatccatttcattctcctgtgtgtggatattgcttttttctagcaatacttattgaaaaaactgtccttgttttaattgtgtgttcttggtacctctgtcaaaaggcaactggccatatatccatcattttttttttcactctttttttttttttttttttttgagatggagtctcgttctgtcgccaggctggagtgcagtggcacaatctcagctcgctgcaacctctgcctcccgggttcaagtgattcttctgcctcagcctcccaagtagctgggactacaggtgtgcaccaccatgcctggctaatttttgtatttttagtagagacagcatttcaccatattggacaggctggtctcaaactcctgagctcgtgatccacccacctcagcctcccaaactgctgggattacaggggaaagccaccgcatctagcattttttactctttttattctgttccactggttgatgtgtctatttttaaggaagtactatcctgttttaattactatatcttcataatacagtttgaagtaaggtagtgtgatgcctccaggtttgttttgttcaatgaatcccatgctcaagtgtgaaaaaaacaggatacatgcccgatgtaggactgggatcaaagagaggacatttctgtccactgtacttaacaatttggctaaccatctcagaagatccaacccactccccttgtcacccacacccacaaactgtcacaaagtggaagagaagaagtagctgagacctcaacaggcaaggaaagcttaagacagttccgtgaagtttccggggccccaggtgcaaaggagaagcagccagtgttttccatctcttggaagtaggtcttccaagctcatgaaatgggataaagtatggatagaggcacttgccaaaactatggagtcctcacatctgtctctgtggacagaaaaataaggatttttgattgaatcaagcacagaaggagagactaaggaggagagcaacccttttgaaagggactaagagttcatagaaagccagtaacagacggttgtagatcatgaccaagactttgcatgtgttgctctttgggctgtagcgccactgcaggttggaaggatgaagttttacacatctaaagaacagggtattaagtggtagggaaaaaaattcttatcagtgatcacaggatataaacttttattttcccaaaaaactctcccatttgcagggtgtttctcaaacactgtctaatgagatgctttctccctgcccatctgaactctgacctgtgatcccacctctgatccactcccagtttctattgtctcttggttctccacattccagggctccttcccttgttccaacaaggagataatactcagatcaaaaggagagattcctgcttatgagaagaaagaaggccaggcatggtggctcacgcctgtaatcccagcactctgggaggctgagttgggcagatcacctgaggtcaggagttcgggactagcctggccaacatggtgaaaccttgtctctattaaaaatacaaaaattagctcggcatggtggctaaagcctgtaatcccagctactcgggaggctgaggcaggagaatcgcttgaactcaggaggcggtagttgcggttgcagtgatccgagatcgtgccattgcactccagcctgggtgacaagggtgaaactccgtctcaaaaaaaaaaaaaaaagaaagaaaagaaagaaagaaaaaaaaaaagaaatataatgtgctgtggcttttccagaatcgtacccttaggtttacatgagaagagaggaaactgtagacggatttggaaaaacatttcaacagttgatccacggaatgcctcctgagtggttaggaaacaccacactacgcagatatctagctttcttccatgaaccactcaatcaaaagcacagaagtagaaaacagaaaatcaaacattttaaaagtctggtacaaggtattatgcatacaaaactctaaaactctccacaaagtgggcagaccatctcgagaaacagcaagattaaagtccagatcctgcatgattaggcttttcatttatgagtcaacaggacatcaatcctcatcaagcaatgcaggggctctcaagagactcacaagggaaaatgaaaacatacacgagaacagaccctgacttctaaaagaaagtcatcctcacccagggagaccaggttcctataattctccaacatgacgtccctgtacaaagtcttctgagcagggtccaggcatgtccactcctcctgagagaattctatggccacatccttgaatgtcaactgtccctaaaatgaaaaacacatttcaccaagtgactatgaggaaaatttgaatcttcacataaaacaagaagaggagagagctgtaagaataggttcaattcacgtaagcagactgacacatccaggctgtgatcacggtacatacagatttgatcttcctccccttttcctgaaaagggctcacttgaaatctgtgaggtgataagtatctttttgtatgtcagtgaggctaactggtggctgaaggctgctagatagcttcagggtgtgggctggacactggaaagaccaaggcaagattacagggttaggctgggagccattgctcatgcctgtaatcccagcactttgggaggccaaggccagtggatcacttgaggtcaggagtttgagacaagcctggccaacacagtgaaaccctgtctctactaaaaatacaaaaattagccgggcatggtggtgcgtacctgcaatcccagctactcaggaggctgaggcagcagaatcacttgaacctgggaggcagaggttgcagtgagccgagatcacagcaccacactgcagcctgggtgacagagtgagactctgtctcaaaataaataaataagaataaaaataaataaaagattacagggttgggacttccaggctcaatctccaacactgcaaaagggaagaagggctgaaggttcagttgaacatccatggccaataatgtaaacagttatgcctatgtaatgaaccttccacaaaaatgcaaaaaattaaggttctgaggagcatctgggacagatgataacatggaggctccttgagtggtgcacccacagagggcatggaagctcagagccccttctccctatctcacccaatagatcgcttccacctgcattctttgttatatcctcagcaataaatgaatcaatatgaatcaagtcttcccctgaattctgtgagccactctaacaaattaattgatcccaacgaaaaggtgatgagaatttacaacttaagccagttagtgagaaacccaagccacaatctgtgtttgtgaatggcaatgaggtggctgcacccttgtgggactgagccctacacctgtgggatgtgatgccatatccagacagtgtaagaactgaactgaatgggaggacacccaggtcatatatccacggcagaactgcttgattgatgtgatggaaaacccaacacatctgggagaacggaagcattctgtgttgcaagagtacagtagaagaaactgaatctggctgggcatggtggctcacgcctgtaatcccagcactttgggaggccaaggcgggtggatcacctgaggtcaggagttcgagacgagcctggccaacatggcaaaaccccgtctctactaaaaatacaaaaatagccaggtgtggtggcaggcacctgtgatcccagttacttgggaagctgaagccggagaatcatttgaagccgggaggtggaggttgtggtgagctgagatcacaccattgcactccagcctgggcaacagagcgagattctatctcaaacaaaaacaaaaacaaacaaacaaacaaaaaactgaaccagtttttccctatattctcacacactaaaatttatttgagcaagttatgtctgtttaatcctgtttcattattcttttccctaagaggttatgatatcctctaaattagtgtggatttgttttgtggacaataaataaatatacagatacaaaatcagctgggctcagtggctcatgcctgtaatcctagcactttgggaggccaaggtggggtaatcacttgaggtcaggagttcgagaccaacctggccaacacagtgaaacgctgtctctactaaaaatacaaaaattagccggaaattgcttgaacctgggaggcagaggttgcagtgagccaagattgtgccactgcactccagcctgggcaacagggagacaaacaaaacaaaacaaaacaaaacaaaacaaaacaaaaaaacccagcacaagtttatctctaccagtgttagatagatattatgtcggacacatcaagcaatattcagcatctagatgacctagagaatgagtggtgtcttcaacgatgataatatccacagtggctttgaagaaaaaacaagtcagagccttaaaactatgatgagagcaatagcaatgacagggatttaagaacaatgcccatatgcaaggtagtattttaaatcctttacgtgtactaacacatacaacactgtagcccatgagagaaagatctgctcccattttactgtggggacaactgtttcacagacacactgagaaacctgtctcaggtcaaaggactaaaaatgacagagcaagtacctgtacccaggtgtctaggaattaaaattaaacctaagcaatcagttaagcaacaggcaagctacctgaaagagcagctcgcaatgccctgaataatcttccaaagagggtaagtaggcggtttggaatgctaaagcattaaggaaggctacatagtcaagaagagccttcagagttttcattttagaatctcagtgtctgagatcagtacaaaggagtcaatgtatctgtccaaggttctgaaagggtggtcattttggaagaattcatttatgtaacgacgtgtaccaatgtctaatagattcccaacatccttttgtgcaacatctatcagcagctgctcacgttctactgtgaatgactgacatgtagattggtctgaatagtttcttggtcattaaactggttagaaaagaactttcccagtcttttagatgctacactgtggctgaaatcctctgaactactgtgaaaatgaggtttacaaaataaagaaattggccaggcatggtggctcatgcctgtagtcccagcactttgggaggccaaggcaggcagattgtttgaacccaggagtttgagaccagcctgggcaacatagcaagaccttgtttctacaaaaaagtaaaaattattaaaagtaaaaataaataaatacaaacaaataaagaagtacaagaaatgagagaatgttggagaatgaagggtaaaatgatgtcgagcaaaactggccacagaatgtgttaatatattcaagttcaaatagtgttttatgaagaaagagactttaaaatctcaggggtaagcaaatttaaactgaaaacagaataaaaagtcctagaaagatacagtaaaaagtagtgtctgtctctttgcataaagtagtataatatagtttgcataaagtagtataatatagtttgcacgcatttggaagacaaccagctggcaggggaattatctcaaagaactacacaggagccaaatgagattatcaaggacaacaaaccacttcctttattacaaggtcacacttatagaaaaaagcacatgtaaaaacctaatttcagcactgaattcaggactttctcactggaaatttgggtagaatcaaaagagaaaacaaagataaaagtggctatgagttttggctgagcacagtggctcatgcctgtaatcccagcactttgggaggccgaggcgggtggatcacgaggtcaggagatcgagaccatcctggctaacacggtgaaaccccgtctctactaaaaatacaaaaataaattagccaggcgtggtggcggacgcctgtagtcccagctggtcgggaggctgaggcaggagaatggcatgaacctgggaggcggggcttgcagtgagccgagatcgcaccactgcactccagcctgggtgacacagagcgagattccgtctcaaaaaaaaaaaaaaaaaaaaaagtggctatgagtttatgagttttgtataaatatgtaaatttatttcttttttttgtttttttttttgagatggagttttgctttgtcacccaggctggagtgcagtgggttcagggagcttccagagggctgacatgtggaggttcctggaggacggcatacccagggagggcagggaagctctgcgcccctttccccatacctcaccttatgcatctcttcactggtatcttctgtaatagtatttataatcaaccagtaaaactgagtgtttctctgacctctaagagttgctccagcaaataaatccaacccaaagaagggttcatgggaacttcaacttgaagttggtcggtcagaagtttcagaggcctggacatgcaactgggaactgagccatcaatctgtgagatctgacactatcttcatgcagacagtgttggaactgaactggaggacagccagttggttgcttgctgtttgttggtggggagaaacccctcgcatttggccacagaagtcttctgtgtggattgtggtgttggtgtgagagcagaggaaaacatggtttttgagttgtttttcctaaacagcaccaaaagtaaattaacatgaggtcacctaactgagaaaaactgaaacaagttcaaggctaacaatatggaatttcaccaaaggtcattatatacacaaacgcatttatgtccatatattactatcctattagttcattaatagataatagagaacaggctgggtgtggtggctcacacctgtaatctcagcactttgggaggccgagttagatggatcacctgaggtcaggagttcgagaccagcctggctaacatggtaaaaccccgtctctactaaaaatacaaaaattagccaggtgtgatggcagacacctgtaatcccagctactcgggaggctgaggcaggagaattgcttgaacctaggaagcagaggttgcagtgagccgagattgcgccccttcactccagcctgggcaaaagagtgaaactccatctcaaaaaaaaaaaagacagtggagaacaaatttaaggccacagaaaatatttaaaatatgatttcaaatgataaaacacatacaatttatttaaatgatggtatgtcttttataaaaccatgggtgtatgcatctacatattcatgtgtgcacatcacatataccagttaaattaagtgaaataaggagatgtgtctcaatgatgtatttttttttatgacatctttagttgtcttttttgctcatgtgcttttcagaaagtctgggacaactgaaatgcatgaattgtacttgatttagtttacaaacatttttgtaaattaagctgtaaaaacgctaaaacaaaaatatgtaagaacttgtactccaattggtattaaatacaaatattaaaagtacagataccatttttttccagttaaatttagatatttaggcattaacaaaagcccaatggaggttttagtttattttactcatgaaatcctaagattaggacattttttaatatcatacatgaatagatttcagaagtacatattgcaacaatacttactcaaagaaattattggataattaaaaatcagtccaaaaaggaaatttgaaaaacacccaaaagctaatattaaacaagaaaatttcaccaaacatcataatcaagcagtaaatgctggatgcatttgatctaaattaaaatggagaaaatgggctgggcatgatggctcatgcctgtaatcctaacaccttgggaggccaaggcgggtggattgcttgagctcaggaattcgagacgatccttggcaaaatagtgagacccccatctttacaaaaaatataaaaattagctgggtgtggtggcatgcacgtgtagtcccagctacttgagaggctgagatgggaggctggcttgagcccaggaggtggaggttgcagtgagccgagattgcaccactgcactccagactgggcgacagggccggaccttgtatcagaaaaaaaaaaaaaggagaaaatgggggctcaccaaggctccagctaaagcccacttcagagcatgcctgagctgagaccaagaaaaaggtaaagtaggagctggatctgttaaaactaacagatgacatactcacaacccaggagaagaatgcattgaagtttaagaactaataacaatactgtgaaaacaatcttcattctttctttagcagctctcattagacacaaacacacaatgcatctcacgagtacattaggaattatacaatgctacctattaaaatacgtttccagacctatttaaagaaattataagactgtactaaagtgatgatgtcaataaaatagaggactagaactcccaaacactacctccaccacggagacacaaatgtagtagcaatatatgaaccaattgctttgtgagaaacccagtggtcatttaagaggttggaactcttaacagaagtctagtaggaaaatacaggacatctgctcccagaggccttaccctggcatgatgcagtgtcactgcaagaaaaacaccaatttcccatttctcctgggagaggaaaagtatgaaaacattcatccaatattctgtcttttcagggcgctgcctgagggataagtttctctcttggttgaatataagtaatgaaggccgggcgcggtagttcacgcctgtaatcccagcactttgggaggccgaggcgggtggatcgcttgagctcacgaattggagaccggcctgggcaacacggtgaaacaccatctctattaaaaatacaaaaaaaaatagccgggcatggtgatgcatgcctgtagtcccagctacgcagggggccatggccagagaatcacttgagcccaggaggcggaggttgcagtgagctgagatcgcgtcactgcactccagcctaggcgacagagcgagactctgtctcaacaaaaacaacaaaaaaaaggagtttggagtcagaaacacagtgactcacttgttcggcatcaaatgcaaatataaatgaggtgacaaagctttccccacagtcgtctcattttacagcatttcgtgggtgcttgtacacactaacatctgacttcataaccagcttctcttatcacagtttacacagagctgtcaatatattcaaatatgtcctgaacaatccctgttgcccaacagcactgacaccacgggaccctcaccccgtctccatccatgtcggggtgtgagcccttcccaggtccatgccccgtgcagcctcttcccaagttcatgtcactgggtcaccagagatggaatctaagtgagatgagagggactgagggaaggcacgagtgagtgcgagcaaacctgtcaggcaggatgcttcagactcagagaagattcccaactccaaggtccaaggtttctgaaaggaaggagacagaacaatccaccgagaatatcatctcacctgaggaagagccatccctgactcctttgccttcctcttcctcttcttccagggttctaccttgggtaacatgaaagagactttagaattcaatcctgaatgtcaaaaatacgctgtttgttggttagaatcaacacaccccctccctgggccataaccttatacacagggaagaccttatacacagggaagatggtcctctgctgcccactgcaccagaaaagatgcagggatgagaaactcctacaggaaaaacaagtgagtttctgacctctttctttagaacccactcccctcctggagaagcccccacacaggctgcagcagtggggagctgggctggaatgagcttctgttcggggcacagacccagccctgaccaaaccccatgctgagcacagtccctctcccctctgtgagtcataggctgatctcagccttcagaaatgatcagcagtgccctggtgctcaatagtagatacagaataacagaacagaacaaatcttaaatgtcactgaagctgggctgcaacttatctgaatgaaaatctctgctaagggggcgtaagagatgtatttgcaaaatgcctcagcattcttgagctccactgagaggggccgagcccagcacagcccccccaccttctggctgtactttccctgggggccttgtcatcaggatccagacagtggaaggtgaagcagcacagagaaacacgcagaacagccaatacagacaagaggtgagggtgggggtggggatggaatgctgaagcgggggtcagggagagggtcacggaagtccccactgaggaagtgatatcagaacaaagacctgggttaggaagggtgtttgcacctgcacctgaggggccagagtcctaggcagagggaccacccatgtgaaggccctgaggcaggagcaacttggggaccccggaaaaggaaaggggcctgagtggctggagcagagggagcaaggaggcacaggcaggagacgaggtcagagaggtcctgggggagcaggtcagggagggctgaggtcttcaaacagtttttctcccacacctccaaagaatgtttaagctgggcgcagtggctcttgcctgtaatctcagcactttgggaggcagaggtgggtggactgcttgagctcaggagtttgagaccagcctgggcaacatggcaaaaccccatctgtaaaaaaggtacaaaatttagtcaggtgtgttggtacgtgcctgtagtcccagctacttgggaggctgaggtaggaggatggcttgaggacaggaggtggaggttgcagtgagccaagatcacaccactgcagtccagcatgggcgacagagcgagaccctgtctcaaaaaaaaagactagaagaaataataaataatttttaaaacactggatttctttaatccacttatcttatttttaactcgcaaataatgtcatatcttctctattttaaatacatgctgacatgttcagctaagccccaagaagtacagggtggcccccatccaccctgggtctgctggggaacacctttgggggaattcaggatgacccttttggacatacgaaggtggagatgcctgttccacctcccagcagagtgttgaggagacaactggacaaaggattccagtgttcaagggagaagtctgcagggaacagggagccgtgtaggtgggtttaaagctgtgagatgagatgataaggaagggcatgggttgtagggtccggccccacaggattggtgggttttctcctcgtgtgtggagacgagagagcttagaaataaagacacaagacaaagagataaaagaaaaggcagctgggcccgggggaccactaccaccaagacgtggagaccggtagtggccccgaatgccaggccgcgctgatatttattggatacaagacaaaggggcaggataaggagtgtgagccatctccaatgataggtaaggtcacgtgggtcacgtgtccactggacagagggcccttccctgcctggcagccgaggcagagagagagaggagaaagagagaaacagcttacactattatttctgcttatcagagactttttgtactttccctaatttgctactgctatctaaaggcagagccaggtgtacaggatggaacatgaaggcggactaggagcgtgaccaccgaagcacagcatcacagggagacggttaggcctccggataactgcgggcgagcctgactgatgtcaggccctccacaagaggtggaggagcagagtcttctctaaactcccccggggaaagggagactcccttccccagtctgctaagtagcgggtgttgttccttgccacttacgctaccgctagaccacggtccgcttggcaacggacgtcttcccagacgctggcgtcaccgctagaccaaggagccctccggtggccctgtccgggcatgacagagggttcgcactcttgtcttctggtcacttctcactgtgtcccctcagctcctatctctgtatggcctggcttttcctaggctatgattacagagggaggattattataatattgggataaagggtaactgctacaaacaaatgattaatgatattcatatataatcataactaagatctatatctggtataactattcttgttttatattttattatactgaaacagctcgtgtccttggtctcttgcctcagcacctgggtggcttgccacccacattgggtgtggacaggaaccaagaagctcagggagtaagccgtgcatagtccacatttagggaacagaaaaatcaagagacaccagaagaggaaagcgtgacgtgatcagcgaggtatcaaaaacttgaaaacaaacagtttaaaaaggttaatggtatgtccttaaagccaggaaaacagaagagaaagtgagaaaagaaaaaaaaggaacacaaagaagtttttgtgtactattctcttaaatagagcatagaagaggggaacttactacagaaggaaaagtagttaagggttttttttttttttttttttttttttttaattaatttattttttttttattgatcattcttgggtgtttctcgcagagggggatttggcagggtcataggacaatagtggagggaaggtcagcagataaacaagtgaacaaaggtctctggttttcctaggcagaggtccctgcggccttccgcagtgtttgtgtccctgggtacttgagattagggagtggtgatgactcttaaggagcatgctgccttcaagcatctgtttaacaaagcacatcttgcaccgcccttaatccatttaaccctgagtggacacagcacatgtttcagagagcacagggttggggataaggtcacagatcaacaggatcccaaggcagaagaatttttcttagtacagaacaaaatgaaaagtctcccatgtctacttctatccacagagacccggcaaccatccgatttctcaattttttccccacccttcccgcctttctattccacaaaaccgccattgtcatcatggcccatccccaatgagccgctgggcacacctcccagacggggtcgtggccgggcagaggggctcctcacttcccagtaggggcggccgggcagaagcgcccctcacctcccggatggggcggctggccgggcggggggctgacccccccaccaccctcccggacggggcggctggccaggcagaggggctcctcacttcccagtagggacggccgggcagaggcgcccctcacctcctggatagggcggctggctgggcgggggggctgtcccccccacctccctcccggacggggcggctggccgggcagaggggtcctcacttcccagtaggggcggccgggcagaggcgcccctcacctcccggacggggcgactggccaggcggggggctgatccccccacctccctcccggacggggcggctggccaggcggggggctgaccccccccacctccctcccggacagggcggctggccgacccccccccccccgcctccctcccggacggggcggctggccgggcagaggggctcctcactttccagtaggggcggccgggcagaggcgcccctcacctcccggacggggcgactggccaggcggggggctgatccccccacctccctcccggacggggcggctggccaggcggggggctgaccccccccacctccctcccggacggggcggctggccgggcagggggctgaccccccctcccccctcccggacggggcggctggccaggcggggggctgaccccccccacctccctcccgggcggggcggctggccgggcagaggggctcctcacttcccagtaggggcggccgggcagaggcgcccctcacctcccggatggggcggctggccaggcggggggctgatccccccaactccctcccagacggggcggctggccgggcggggggctgaccccccacctccctcccggactgggcggctggccgggcggggggctgacccccccacctccctcctggacggggcgtctggccgggcagaggggctcctcacttcccagtaggggcggccgggcagaggagcccctcacctcccggacggggcggctggccgggcggggggctgacccccccacctccctcccggacggggcggctggccgacccccccccccgcctccctcccggatggggcggctggccaggcagaggggctcctcacttcccagtaggggcggccgggcagaggagcccctcacctcccggacggggcggctggccgggcggggggctgaccccccccacctccctcccggacggggtggctgctgggcggagacgctcctcacttcccagacggggtggttgccggacggaggggctcctcacttctcagacggggcggttgccaggcagagggtttcctcacttctcagacggagcggccgggcagagacgctccccacctcccagacagggctgcggcccagcagaggcgctcctcacatcccagacagggcggcggggcagaggtgctccccacatctcagacgatgggcggccgggcagagacgctcctcacttcctagatgggatggcggcggggaagaggcgctcctcgcttcccagatgggatggcggccaggcagagacgctcctcactttccagactgggcagccaggcagaggggctcctcacatcccagacgatgggtggccaagcagagacgctcctcacttcccagacggggtgggggccgggcagaggctgcaatctcggctctccgggaggccaaggcaggcggctgggaggtggttgcagcgagccgagatcacgccactgcactccagcctgggcaccattgagcactgagtgaacgagactccatctgcaatcccggcacctcgggaggccgaggctggcggatcactcgcggctaggagctggagaccagcccggccaacacagcgaaaccccgtctccaccaaaaaaaaaaacgaaaaccagtcaggcgtggcggtgcgcgcctgcaatcgcaggcactcggcaggctgaggcaggagaatcaggcagggaggttgcagtgagccgagatggcagcagtaccgtccagccttggctcggcatcagagggagaccgtggagggagagggagagggagagggagagggagggggagggagagggagagggagagggagagggagagggagagggcccctttgtttcttataggagatgctgggtaatccagattaaatttttgaccgggtttttgttttttttgagatggagtctagctgtgtcacccaggctggagtgcagtggtgtgatctcagctcactgcaagctctgcctcctgggttcaagcgattctcctgcctcagcctcccaagtaactgggattaaaagtgcacatcaccacggccagctaatttttgtatttttagtagagaagacgtttcatcatgttggccaggctggtctcgaactcctcacctcaggtgatctgcttgcctcagcctcccaaagtgctgggattgcaggcgtgagccaccatgcccagccttattttttgttttaaagttgaaagagtagatgagaaagaaaggctttattttctgtgtgtgtgtgtgtgtgtgtgtgtgtgtgtgtgtgaatagacaagaccactaatctggatatgctcatcaaaataattcccttgaagtaaaagttgacacagtggaggagggagccacaccgtcctgagactgtggtgcaaaactgaagagccagctgtagggaccagccccacagggtcagtgggtctctccccgtgtgcagcgacgagagagtgtagaaataacgacacaagacaaagagataaaagaaaaggcagctgcgcccgggggaccactaccaccaatgcacggagaccggtagtggccccgaatgtctggctgcgctgttatttattggatacaaggcagaaggggcagggtaaagagtgtgagtcacctccaatgataggtaaggtcacgtgggtcatgtgtccactggacagggggcccttccctgcctggcagccgaggcagagagggagaggagacagagagaaagacagcttacgccattatttctgcatatcagggactattagtactttccctaatttactactgctatctagaaggcagagccaggtgtacaggatggaacatgaaggcggactaggagcgtgaccaccgaagcacagcatcacagggagacggttaggcctccggataactgcgggcgagcctgactgatgtcaggccctccacaagaggtggaggagtagagtcttctctaaactcccccggggaaagggagactcccttccccagtctgctaagtagcgggtgttttcatttgacacttacgctacccctagaccacggtccgcctggcaacgggcatcttcccagacgctggcgtcaccactagaccaaggagccctccggtggccctgtccgggcataacagaaggctcgcactcttgtcttctggtcacacctcactatgtcccctcagctcctatctctgtatggcctggtttttcctaggctatgattatagagcgaggattattataatattggaataaaaagtaattgctacaaactaatgattaatgatattcatatataatcatatctaagatctatatctggtataactattcttgttttatattttattatactggaacagctcgtgttctctgtctcttgccttggcacctgggtggcatgccgcccacagccagcaacagcccggagcagggacagaccattcccagtacctcctgagttgagattgcaggccttaagacaggtgggtgggcccgttggagagctcttccctttactgtttgagacaggaaaaaattaaactgttcatactattgtcacactcaacccagaatacttcacttgtagtcaccaaaatgtgtgcagtttttcccacaatgaccagttctgcagtgcactcccagtggtgggtcctacaatttcactccactctgacactgtcagttctcccaggtgaagatctcagtgtgctacatgctactagtagctgttggctacactctcaccagataaataccgtgattctcttaaccccttccttggattcaattaacttgctaaaaccattcatctgtatgcttcgtagtatcctttataacaattaggtaggccgggtgcggtagctcatgcctgtaatcccggcactttgggaggccaaggtgggtggattacctgagatcaggagttcaagaccagcctggccaacatggtgaacccccttctctactaaaaacacaaaaattatctgggtgtggtggcggacgcctgtaatcccagctacttgggaggctgaggcaggagaattgcttgagcccaggaagcggaggttgcagtgagccaagatcgtgccattgcactccagcctgggtgacagagcaagactccgtctcaaaaacagaccggcaaacaaaaaacaattgggtaaaccaaggaaaatgtttccctgagttctatgagctgctctggcaaattaatagcacctcaggaagggatgaggagaatcccaaatttatactcaatggatccgaagctccgaatctgggacttggggctggtatctgaagagggaaccctcaactagtgggatctaatgctaactctgggtagacagtgtccgaattgaattaaattattggacagtcaggtagtgtttgttcaagaactgcgtgttggtgaggagaaatccccaccccacacgttttggtgatgagaggcgatgcattctttgttgagcgttcattacttgattatgagagtgggaaaaacactttggtttttcctcctcactcatacacttgcctacacattaccccatcctaggaaaaggaaagagggtgacccataactgaatgagtcaagtcactgctctcttagaacagagattgcaaatagaagctaacctctgatgccaggaattataaaatgcacatgtcttatagacaaaacttttgtgattctcaccagcatctccataacagaaacaaaatatatacatataaaatttgttagattattaggggctgggcacagtggctcatgcctgtaatcccagcattttgggacgctgaggtgggtagatcacctgaggtcaggagttcgagaccagcctggtcaacatagtgaaaccccgtctctactaaaaatacaaaagttagccaggtgtggtggtgcatgcctgtaatcccagctactcgggaggctgaggcaagagaatcgcttgaacccaggaggcggagttacagtgagtcgagatcgtgccattgcacgccagtctgggaaatagagtgagattctgtcttaagaaaaaaaaaatttgttagattatggatacagaaatcaatatatcacgatgtaattatccatatccaatgaaaccaccatgcatctgggccatagtccccctctttcttccttcctgtgtgtttccctccctcattctgtacatctctctcattctcttcttctctctccttgtttcttttctgtgtttcagcctgggtctctgctcctcattttgagcccctctcttctcctgctgtttctccttccctctatccttctcttccacttgttctgttccattcttgcaacttgtttcacctcttattcctctttcacccgtcttttggttgtccccaatctccatctatttctgcctctttcttcccttatctctgctctccctgttaaatcccctcttccctgtttcacttccttgtccccactctttggcacccccagatcccaggtctccccctgctgtggttctccctctgctctccttgtcaccagctgccccttcttgctgtcccagcaccacgctgctctgtctatcctggctccaaataccccctcctctccctaactctccgtctgaggagctgcccctctccctaccttgctgtccttcatctctctagacagcgagcttttctctacatttctccagttgtttctccatcctgttactttctcagcgacttctttcacccttactgtctctttgtaaatcctgacccatcctctactttgccatgtttactggtttccctcattctttcctctgtctccgtttttctacttttctctcagcccccctctctgtctcctgatccccttggcccacacattcacagggagggtttggagtaagacacctggatcctggaggagcacattttccagcgggtggagctgggcaggcaagaacaccgggtatcacaggacaaggcccgggcacctccccaacgcgggctcaggggaaacggtgactgcgaaggggaggcctagggagcagcagggcccggcacgaggaggagggaggtggggggcgacggcgccttaggagaggggtggggtatgcaggatcccaggaccaggcagaggcgcggcctccccgggactggggctgcggcgctaacgctccagtagctgactagggcgaggttaggggacggtaaaatcctgcacccacttcgcagatgaggacttcacagggcgcaggtcagtaaagggttttaagcaggaaacggcgcaggaaaggaggtgtctgcatggtctgaaggccgaaagaccgcgggcaggaccagcctgtgtgattttaacccaaagcgatgcgacccccagagtctcgcggcaaagtctgaatttacatggaatggagggagccgtgcggggactttaagggctatacgaacccccggacatcgggtacggaggagcaggggactccgaaacgcaggtttaatctagatagagggaaactcacgcggcgactaacagccttcactccaagagatctgcttccgggtttgcaagaaactgcccgcgcagtaggcaaaggggcgggttgcggtggggaaaggccaggcgttgggagggactgagagcatagggtgggcggggccggggcggggcctgaaccctggaggcggaggttgcaatgagccgatatcgcgccattgcactccagcctgggtgacagagtgagacttcgtctctcccaaaaaaaaaaaaaaacaaaacttaggctatctaaaagtttaaccaatggccagtaatataagcaatcatgcatatgtaatgaaggcgccataacaacccaaaaggagaggattcagcggagcttctggataggtgaacactgggaggctcctgcagcgtggtgcacccagggagggcaccaaggctcaacgccccttctcccatgcctcacctcactgatcccttccatctggctgttcttctgtcaactttgtaatatcctttataatacgtaaatctatgtaaagtgtttccctgtattttgtgagccactctagcaaattcgttgaacctgaggagggggtcaagggactcctggatttatatctgatctgtaagcacaagtcacaacctctgcttgagactggcattgaaatgtgtgcactattgtgggactgagccctcaacgtgtgggatctgatgccatgtcccggcaaaatggaacggaatgagagaacacgcacctggtgtctgtggcaggattgcttgcttggtgtgtgtgggaaaacccagtacctctgggctaactgtagcattctgtgttgtgagagaacagtagaagaaactgaatcagtgtttcctatattcttaaatacgaatatgtgaggtttgttgttgtttttttttttttttttttttttttagacaagagtcttgctcttgtcgcccaggctggaatgcaatggcatgatctcggctcactgagccaccgccccagcgtgaaggcatttttgagcaagttatgtctccctaattctgttttattgtacttttccctaagtagttataatagcctctaaatctgtgtggagttttcagttttgtggacaatacaataaatagacaaataaaaacccaaacacaagctgatctctatagaagtgttagatattattttcaacacactaagtgatactccgtatctagataagctaaagcacgaatgatgtcttctgaggtgacaaggtccacagtggctttacagaaacactggccagaagtaaaaactgtgatgataatggcaatagcaatgactgacttttctgaacactatgtgcaaggcattattcggaatactttacctgtattaactcaaataacaacataatagcccatgagaaaaagatcttttcctatcttactaggaaacaactgtgtcggccgggcgctgtggctcacgcctgtaatcccagcactttgggaggccgagctgggcggatcacgaggtcaggaccggatcacgagccgggcggatcacgatggtcaccaggagaccatcctggctaacacggtgaaaccccgtctctaatgataatacaaaaaaattagccgggcgtggtggcgggcgcctgtagtcccagctactctactcgggaggctgaggcaggagaatggcgtgaacccgggaggcggagcttgcagtgagccgagatggcgcccctgcactccagcctgggcgagagcaagactccgtctcaaaaaaaagaaaaagaaagaaactgtcacagatacgctaagaaactggcctaaggtccaagagctagaaatgacagagcaagccccgaacccaggcatctaagaattacagttaggctgagagcagtggctcacacctgtaatcccagcactttgagagcctgaggcaggaggggtgcttgagcccaggagttcaagaccagcctgggcaatatagtgaaaccccatctcaacaaaataaagacaaaacaaaaacaaaaaacccctcaacaattacaattaaacctaaagaatcagttaagtaacagaagtaccatcaaaagtgacaggatgccaggtcagggaaaccattgagaacaaaggcaagcaacataaacgagagtctgcagtaacgcaggcagacactaggtggagaaccagaccacagcttaccatgaaaacacagggactgcagaattgcagactgtcaacaggagctctcctgaagaaaaactggcaaaccttctcaggtaactacaagcaaaagcccagagacgacacattcccagaaaaggcttcagaggtttccagaatctctagtcaggctgaatagagaaggtcctccctgaaggaagccagaaataaaaaagtaggactggttgattagtgaaatgctgaggtgccaagataacaagacattcaaggagaaaaggaaacatgatccacacaaaggaacaaatgaaaccaccacaaactgacactaaagaaatgaagatgtgtgaattatcagacaaagaattgaaaataagagtcacaagatggtcaatgaattaagaggagagcacacatagacaaccacaggaaatcaggaaaacaagatatgagcaaaatgagactatcaatagagagacagaagctataaaggaaaaacagagaaattttagagctgaaaaatgtaatcagaaacgcagaacacagagccttggtgctcaatgctgcacacagattacaacgccctgggccaccgtagttattattgagggtagatcccaacctgaccatgggaataggaatcttgggcaaaagaaagttgaaatggttaaacttatacgttaatacgttaaaatacgttaaaaggtatttttgccagcgaatgggacagaagttgaaatggttcacgttgaaatggttattactgccagcaggtaggacagaagagctgctagtgagactgaagcaactctgggtggggatctggcatctctgggggtgtcggtttggggtagattgaatccaggaaagtttctgcaatttgaattaatttaagcaacttaactaaaaagccctgaaaatgtctgtgaagggtatgcaaactagaatgtgaaatgcaaaactctgcctgggcagaatgtgtaagtaatttcaagtcacctctcaacagaacttaatgcaatcccctccacattctacacccattcaccatggagggagagagtcagccctgtgcacagttgcagagattttcatatggtaaatacctggggtgtggagcgaggagggctaataccggtgatattaactcttgctttagaaaaagcagtaactttttaaaaatagttgagcaacttaagtttgcaacttaggaaaacatcttactttccaacagagatggcccacataactctaagggtttaccttaaaattgagacattaacttaaaataagcagaaagcaaaactgctccgcaggacacgaaatagacttgtgttcccaaacccagaaaatagggacgctctgggtaccaggtggctggaaacgcaggctcccacccgccttccttaggtccctcccggccccgccccctgcctgtccaggccccgccccacccttcgcgttttctccccagcccactccctgtgccggtcacgccccgcctaggccccgcccctaggccacctcagtcccctccggccccgccccctgccggtctctccctggccaggccccgccccttccccgcccccagaccgcccagtctccgctgcgagcggttttctgtagacccggaagcggatcgcggggagtgaaggctgcgccgccgagcctgagtttcgctctctctagattaaatctgcgcttcgcagtcccccttcttccatcccccgggtctggaggggtccctacagatcttaaaatgaccacaccgcgccctccaccccaggtaaattctgacgttgctgtgagaatgcggagatcgctttccctttgggttaaagtcgctctaagcctacttcctgaatctggtctttctgctttgcgctaggtaaacatggcctttcgtgtcttttgctgcctaaaatcctttaccgatttttcttcccgccacgcgggagggcacttttttttttaagacggagtctcgctgtgtcgcccaggctggagcgcagtggcgcgatctcggctcactgcaagctctgcttcccgggttcacgccattttcctgcctcagccttccaagtagctgggactacaggcgcccgccaccacgcccagctaattttgttgtattttttttagtagagacggggtttcacccgtgtttgccaggatggtctccatctcctgacctcgtgatccgcccgcctcggcctcccaaagtgctgagattacaggcgtgagccaccgcgcccggccgggagagcactttttagagccctcacctgcaaggtggattcaggtctatccggttctccaagacctgcccttgtcggcccctggtgcgcagcgctgcagcctcagtccggaggggccgcgtccttacttggttctgggattctgcagaccccacccctgtcctaaggtgccacctttgtctttctcacccgaaatctttctcaggaagggccttcagctcccaagcccctctaggcagtcacctcccatggtgggaaggtgagctgggcttgtcctgtgacactcatggtggaggaggtgacctaggcctgttcggtgacacccagtatgcttttttttttttttttttttgagaatgagtctccccctctgttacccaggctggagtgcagtggcgcaacctcagctcactgcaacctccacctcccgggttcaagcgattttcctgcctcagcctccggagtagctcggattacaggcatgtgccaccacgcccggctaatttttgtattttcagtagagtcggggccaccatgttggccaggctggtctccaacccctgacctcaggttatccgcccgcctgggcctcccaaagggctgggattacaggcatgagccaccgcgcccagccaacatataacacttctgacagcaaatgtgtgggagtttttttcccacacactaggcaattctccagtatacaccagttgcgtgtcctataattcaattcaattctgacactgtgcgcctggagttagagtcagatccaacaggttaaggtcttagtcccacaagaccacccccctgcccccccgccgccacttcagacgtcagtcaaaagtaataggttgtcacctgtccttaaaactgacctatatattggggctcccatgactccctctttgggtttgattaacttgtgaggacagctcacaggactgctggaagcacttacttatgtttactgattttttgtgcagtcatttctcacttcatgttttctacaggttcttggaaaccgggtcatgaatgaaatgatatacagcaggtcctcgaataacgttgttttgttcaatgtcatcattatcattattattattattattattttgagatggagtctagctctgtcaccaggctggagggcagtggtgctgtctccgctcgttgcaacctccacttcccaggttcaagtgattctcctgcctcggcctccttagtagctggcattacaggcatgtgctgccatgcccagctaatttttgtatttgtagtagagacagggtttcaccatgttggccaggatggtctcgatctcctgacctcttgatctgcccaccttggcctcccaaagtgctgagattacagtgtgagccaccgcacttggccattcgatgtcattttttatgtagatgaggaaaaaggttgccatttcacttaaagttccggtttccaagaatctattgataacatcaagtgaggatttggtgtattaatgaaggatatcataaaagatacccatgagcagccagatgaagagatatgtatggtgaggtctgagaatgttctaagcacaggagcttctgtccttgtggatttgggtgcacccaccctcctggcattcagatgtgtttatcaaccagaaagctctccgaagtctatagatcaggaacttttatcgaggcttcatcctgtaggcatgagagattattaactcagtcttcagcatgctccactctttgggaaataagtgatggagctgaaatctccaagcttctaatcatggcttactctttctggcaactggctctatccaggagcccaagacttgcctcattagaacaaaaacactcctatcacgtaggaaattccaagggatttaggagctttgtgcaaggacccggggtcaaagaccaaatatgagaaccaaagattctcctaacacccctttctgtgaggggtttaggatctatatcccaggaaccaggggcagagaccaaaaatatatttcttgttatttcacactccctctgagtggagctcaatcctggtttgacttgagagtactgagtcgttttgcaaataaaactcttgtgcctctttacctgagttttccattcatgtaatggggttggagtccagccttgacagtagtgatgttaccccagctgattctaatctgtccagcattgatactgaggctctgtgtcctccatttctttttttaaaattttttagatggagtctcactctgtcacccagcctggagtgcaatggggcaatctcggctcgctgcaacctctgcctcctgggttcaagcgattctcctgcctcagcctccctagtagctgggactacaggcacgtaccaccatacccggctaatttttgtatttttagtagaaacggggtttcaccatgttggccaggctggtatcgaactcctgacttcaggtaatccgcctatctcggcctcccaaagtgctgggattacagactgtttcctccatttctgaggcctcagctcagcctgggatccatagggatgtgagggcggctgtgctctgcatgaggtttgctcaaggccaggtgtgcaccctgaaggggagctcagtccagcccagctccccaccgctgcagcgtgcgtgtgggcctctctaggaggagagtgggttctgaagaaaggggttacagactcacctgttggtcttcctacaagtttctttttcctacaagtttcttcttcctacaagtttctttttcctcctggtgcagtcggtggcagaggactgtctttgcacgggtgtcttccctgtgtgtgtggtcgtggcacaggaagggggtgtgttaattctaggcattaaataacttctttttcacattccagattaacctttaaagactcatgtggcctgaggaagaagtccagaagagaagaaagaggagacagggatggctctttctcaagtaaagtgatattcttggtggattgttctgtttccccctttttttttttttttggagacagagtcttgcactatcgcctgggctgaagtgcagtggtgtgatcttggctcactgcaacctccacctcctgggttcaagcgagtctcctacctcagcttcccaagtagctgcaattacaggtgcccgccaccatgcccagctaattttttgtatttttagtagagacagggtttcactatgttggccaagctggtctccaactcctgacctcatgattcacccgcctcggcctcccaaactgctgggattacaggcgagagccaccgtgcccagcttgttctgtttctctttcctttctgaaatttcattctttggagttgcaaatcttctttgagtctgaagcatcctgcctgacacgtttgttcgcactcacccgtgccttccctcagtccctctcatttcacttagattccattgcctgtgacccactgatgtgaacttgggacgaggccccactgggcatggtcctgggaagggctcacacccatacatggatggacacggcatgtgagccccgtagtgttaggactgttaggcaagagggattgtttagcggccacatctggatgcactgtgaggtctctgtggaccaggagtagagaagctgcacatggaagtcatgtactaatgcgcacaagtacctggtaattccagaaaaggaggctgatgaggggaattctggcacattgtttgtctgatttaagaatacattcgaagataaatacatgaatctgtatgtttttggctccagaattgttatgatttggaatggaatggaaagttcagaaacaccttagtgaggggagggtgttttattctagcactgatttgttctcttttttgagatggagtttcgctcttgttgcctgggttagagtgcgatggtgtgatctttgctcactgtaacctccgcctcccaggttcaagcgattatcctgcctcagcctcccgagtagctgggattacaggcatgtgtcaccatgcccggctaattttgtatttttaggagagacggggtttctccatgttggtcaggctggtctcaaactcccaaactcaggtgatccatccgcctcgtccttccaaagtgctgggattaccggcgtgagccaccacgcctggctccaccaattttaaaatatgaaatcaatctaaatctctttttttttttttgagacaaagtctcactcttgtcccctaggctggagtgcgatggtgcgatgttggctcactgcaacttccgtctcctgggttcaagtgattctcctgcctgggccccctgagtagctgggattacaggtgcttgccaccacaccgggctaatttttgtatttttagtagagatggggttttaccatgttggccaggctggtcttgaactcctgacctgaggtgatccacctgccttggcctcccaaagtgctgggattacaggtgtgagccaccgcacccggccagaaaacaatctaaatctctaacagaaggagattctttacgtcattttcagcacatccttctcttggaggttgcttttcagcctcttgattctttcttttgatgcagagatgtttgtaagtttgatgtagtcccatttgtatatttttgcttttcttgcctgtgtctttggtgtcatatcttagaaatgactgcaaaattcagtttcgcaaaccttttctcctacactttcttctaggagttttatcatgttaggtcatatgttgaggcttttaattcatttttctttttttttgttgtttgtttttgttttttgttttttttgttacccaggctggagtacagtggtgcgatcttggctcactgcagcctctgcctcccgggttcaagtgattttcctgcctcagcctcccgagtagctgggactacaggtgcccgccatttcaccacgttgcccaggctggtctcgaactcttgacctcaggtgatcctcccgcctcagcctcccaaagtgctgggattacaggcgtgagccactgcgcccagcctaaatatttaaatttaaatggatagaattttatttgtagtttgactataactatttcatagggattggagttaaagttttaaatatttttttcatgtttttaccattcttttattggcattatataacataatgttgacaaactaagttaaatacaacttatacactttactgtccccaagatgctgaaatgcacatgaggaaaaatgataatgaaaaagtcataaaaagtatgtcattgagaggcatgttttctctttgttaatttacattcgtgtatatatgtgtgcatgaatgtatggatgaactatcctatggcgtttatagacgacacatcaccatttcataaatcagttccgtatttttatttttttattttattttatttatttatttttttgagacggagtcttactttgtttcccaggctggagtgcagtggtgcgatctcggctcactgcaacctctacctcctggttcaagtgattctcctgcctcagcctcccgagtacctgagattacaggtgtgcaccaccacgcccagctaattttcgtatttttagtagagacggggtttcaccatgttggccagtatgatatcaatctcttgacctcatgatcaccagccttggcctcccaacgtgctgggattacagacgtgagccaccacgcccggccacactttttagattctgacctttctttctttaaagacaccatggacattgtcatctctgaagacaacacacttcttccagctcctccagatactgaatatcactttgtgtgtcaaacataatatctagcacttctatagagatagctgtgtgttgactatttatttctacgtttcttccattgtctacagaaagagaaatccacacttatttagaagatatcataagctcttacagaagagtataataaaatgcaattagggagacatacctaatgttcttcctaacgtccctaaatgccccaaaataccttagcatggatctgccagaactctcccttcagtaaatcaatacaattctctctttttctcattttatgtaaagatgataactctcccccatgtgcttggtaaaatgtgtttttcagacacggtttgcctgaaaatacctttccatggatttcccagaacgttcatttaaactaaattgacttatacctctctttttgtcattttgtgtgaagataatagctctccccatgacttcttggtgaaatgtgttttttcatatcagggaaggttgacattcagggacgtggccatcgaattctctcaggaggagtggaaatgcctggaccctgctcagagggctttgtacagggacgtgatgttggagaactacaggaacctggtctccctgggtgaggataatgcccctccagaagctgggatctgctctgctgtatctctgcatgttccctgtgtgcctcttgggagcccctgcattgctcaattaagactgaagctatgttaattctcagatgaaaagcttaatagtgcagcatctggacttaattatcccattttcaaatgatctacctccttcaagatatatcattggtggttccagagcttaagtagaaataaaccctatggtagactttaaaaatatctactttgggccagcgtggtggctcacgcctgtaatcccagcactttgggaggccaaggcgggtgggtcacctgaggtcaggagtttgagactagcctggccaacatggtgaaaccccatctctactaaaaatacaaaaaattagccaggcgtggtgccgagcgcttgtaatcccagctacttgggaggccaaggcaggagaatcacttgaacccgggaggcggaggttgcagtaaaccgagatcgcgccactgcactccagcctgggcagcaagagcgaaactccatctcaaaaaaaaaaaaaaaagaaaaagaaaaagtaaaaaaatccactttgctcttttctgcccctttgcttgtgattcagtacttcctagaggacagttcgatgttcgtattttaccatgttccctaaacattcagaaggaggcattcagtgggtgaatttgtgaaatatttttctagatccatttgtaatgtcctctttcctcctctaaacaaagggctgggattctgtaaaagccacagcacattacatgcctttctttttctaagcaggaatctctctttctgaaatgagtattacctccatgttggggcaagggaaagagccctggactgtggagagtgaagtgaaaataacaaaaacatcaagtggttgggaatgcatcaaaggtgtgaacacaggtaagagctcaaatggacagagaggaagctgcaccattagtattcaggtaactccttccgagttgaagagttctgtggaacaaaaagggtttaaatcctgtgagctctcaatggaaacctttctttgccctcatttatccctctgctcttctgacgtgtagtagtttatcctttcacactcccatggcgctacagctccaacagtgacaaaggcaaagtctttatcatgatggacaacaccctgtcatgtggcttctgtgacctctttggtttcttcactctgaggggcacagggagggttgtgtccaagaggtctcctgtgatctctcctgtacctgactgcgtctgatgctcagttctctgtctatacagatcagagctgaggcctccatggacctgcccccttgacctattcaggttttgccccatttcctgtacttgggagacctaatcaggtgacgggaaaacattggcagctcctcctttgcatctggggctccggaaacctcatggtgctgtctccagccctgtctgtctgtcaaagtctttcagcctcagtcatttcttctgttctgcttttgccacagattgcagtgtgcgccacaggggagtacacggggttttctgagattgtttactcaggtctggaatggcactagacagagaggtcctctttttttttttcttcgagacagagtctggctctcttgcccaggctgtgatgcagtggtgagatctcaactcactggaacctctgcctcccaggttcaagtaattctcttccctcagcctcctgagtagctggaactacaggcacatgtcaccacacctggctaatttttgtatttttttaaaaattattatactttaagttttggcatacatgtgcagaacgtgcaggtttgttacataggtatacgtgtgccatggaggtttgctgcacccatcaacccgtcatctatattaggtatttctcctaatgctatccctcccctacctccccatcccctccacaggccctggtatgtgatgttccccctccctgtgtccatgtgttctcattgttcaactcccacttatgagtgagaacatgcagtgtttggttttctgttgtgttagtttgctgagaatgatggtttccagcttcatccatgtccctgcaaaggacatggacttatccttctttatggctgcatagtattccatggtgtatatgtgccatattttcattatccagaaactaatatttctggataatgggcatttgggttggttccaagtctttgctgttgtgaatagtgccacaataaacatacgtgtgcatgtgtctttgtagtagaatgatttataatcctttgggtatatacccagtaatgggattgctgggtcaaatggtatttctagttctacatccttgaggaattgccacactgtcttccacaatggttaaactaatttacactcccaccaacagtgtaaaagcattcctatttctccacatcctctccagcatctgttgtttcctgacattttaatgatcagcattctaactggcatgagatgctttctcattgtggttttgatttgtgtttctctaatgaccagtgatgatgagctttttttcatatgtttcttggccacataaatgtcttcttttgagaagtgtctgttcatatccttcgcatagatgttcatgagggatattggcctgaaattttctttttttgttgtgtgtctgccaggttttggtatcaggatgatgctggcctcattaaaatgaattagggaggattccctctttttctgtttggaatagtttcagaaggaatggtaccagctcctctttgtacctctggtagaattcggctgtgaatctgtctggtcctggactttttttggttggtaggctattaattaccgcctcaatttcagaacttgttattggtctattcagggattcgacttcttcctggtttagtcttgggagggtgtatgtatccaggaatttatccatttcttctggattttctagtttatttgtgtagaggtgtttatagtattctctgatggtagtttgtatttctgtgggattggtggtgatatcccctttataatttttattgcatctatttgattcttctctcttttcttctgtattagtctggctagtggtctatctattttgttgatcttttcagaaaaccagcttctggattcgtctattttttgatggatttttcgtgcctctatctccttcacttctgcgctgatcttagttacttcttgtcttctgctagcttttgaatttatttgctcttgcttctctagttcttttaattgtgatgttagggtgttgattttagatctttcacgctttctcttgtgggcagttagtgctataaatttccctctacacattgcttttaatgtgtcccagagattctggtatgttgtgtctttgttctcattggtttcaaagactgccttcatttcattatttacccagtagtcattcaggagaaggttgttcagtttccatgtagttgtgcagttttgaatgagtttcttaatcctgagttctaatttgattgcactgtggtctgagagacggtttgttatgatttccattcttttgcatttgctgagaagtgttttacttccaattatgtggtcaattttagaataagtgcgatgtggtgctgagaagaatgtatattctgttgatttggggtggagagttctgtagatgtctattaggcctgcttggtccagagttgagttcaagtcctggatatccttgttagttttctgtctcattgatctgtttaatattgacagtggggtgttaaagtctcccactattattgtgtgggagtctaagtctctttgtaggtctccaagaacttgctttatgaatgtgggtgctcctgtattgggtgcatatatatttagtatagttagctcttctggttgcattgatcctttaccatcatgtaatgcccctctttgtctcttttgatctttgttggtttaaagtctgttctatcagagactaggattgcaacccctgctttttttgctttccatttgcttggtagatattcctccatccctttattttgagtatatgtgtgtctttgcatgtgagatgggtctcctgaatacagcacaccgatgggtcttgactctttatccaatttgccagtctgtgtcttttaattggggcatttagcccatttacatttaaggttaatattgttacgtgtgaatttgatcctgtcattatgatgctagctggttattttgctcattagttgatgcagtttcttcatagtgtcgatggtctttacaatatggtatgtttttgcagtggctggtaccagttgttcctttccatgtttagtgcttccttccttataaggcaggcctggtggtgacaaaatatctcagcattagcttgtctgtaaaggatttgatttctccttcacttatgaagcttagtttggctggatatgaaactctgggctgaaaattcttttctttaagaatgttgaatattggcccccaccctcttctggcttgtagagtttctgccaagagatctgctgttagtcttagggcttccctttgtgggtaacctgacctttctctctggctgccattaacattttttccttcatttcaaccttggtgaatctgacgattatgtatcttggggttgctctccttgaggagtatctttgtggtgttgtctgtatttcctgaatttgaatgttggcctgtcttgctaggttggataagttctcctataataatatcctgaagggtattttccaacttggttccattctccccatcactttcaggtacaccaatcaaatgtagatttggtcttttcacacagtcccatatatcttggaggctttgttcatttcttttcactctttcttctctaatcttgtcttctcactttatttcattaagttgatcttcaatctctgatatcctttctgctgcttgatcaattcagttattgatacttatgtatgcctcatggagttctcatgctgcgtttttcagctccatcaggtcatttatgttcttctctaaagtggttattctagttagcaattcatttaaccttttttcaaggttcttttcttccttgcattgggttagaacatgctcctttagctcagaggagtttgttattacccaccttctgaggcctacttctgtcaattcgtcaaactcattctcctagttttgttcccttgctggtgaggagttgtgattctttggaacagaagaggcattctggttctttttgtgctggtttctccccatctttgtggatttatctacctttggtctttgatattggtgaccttcagatggggtctctgagtggatgtccttttagttgatgttgatactattcctgtttgttagttttccttctaacagtcaggcccctctgctccacgtctgctggagtttgctgggggtctactccagaccctgtttgcctgggtatcaccagcagagactgcagaacagcaaagattgctgcctgttccttcctctggaagcttcatcccagaggggcacccgccaggtgccagccagagctctcctgtacgaggtgtctgtcggccccctactgggaggtatctctcagtgaggatacatggggggccaaagacccacttgaggaggcagtctgtcctttatcagagctcaaacgccgtgctgggagatccgctgctgtcttcagagctatcaggcagggacggttaagtctgctgaagctgctcccacagccgcctcttcccccaggtgctctgtcccagggagatgggggttttatctataagtccctgattggggctgctgcctttttttcagagatgcccagcctagagaggaggaatctagagaggcagtctggccgcagtggccttgctgagctgtggtgggctctgcccagttcagactttccggcagctttgtttacattgtgagggtaaaaccgcctactcaagcctcagcaatggcggatgcccctccccccaccaagctcaagtgtcccaggtcgacctcagactgctgtgctggcagtgagaatttcaagtccatggatcttagcttggtgggctccgtgggggtgggaccccccaagccagaccacttggctccctggcttcagccccctttccaggggagtgaacagttccgtcttacgggtgttccaggtgccacgggggtatgaaaaaaaaactcctgcagctagctcggtgtctgcctaaacgtccacccagttttgtgcttgaaacccagggccctggtggcgtaggcactggagggaatctcctggtctgccggttgtgaagactgtgggaaaagcacagtatctgggccagagtgcaccgttcctcatggcacagtccctcacagcttcccttggctagggagggaaatcccccaaccccttgcacttccctggtgaggtgacgccccaccctgctttctcttgcactctgtaggctgcacccactatccaaccaattccagtgagatgaagtgggtacctcagttggaaatgcagaaatcacctgccttctgtgtcgatctcgctgggagccgcaggccagagctgttcctatttggccatcttgccagcaaatccctaatttttgcatttttaatggagatgaggtttcaccatgttggccacctggtctggaactcctaacctcaggtgatctgcctgtcttggcctcccaaagtgctgggattacaggcgtgagccactgcacccggccgatatatttttcaatatgaactactgatttgccaactgtagttaatagaaaacctgttttttaaatatcttgtagatgtctctcctacacatatgatcaaggaattaccaccaaaagagaacaatagcacaggaaaagtattccaagcagtgatgttggaaagacatgaaatccatgacatccaagatttttacttcagagaaatgcagcaaaatattcatgactttgagtgtcagtgtcacaatgatgagagaaattacagagaaatacctgcaattaaaattaaaaacatcactggaagaagagatcaaggtgatggaaggaatgcaggaaataagccagttgaaaatcagcttgaactaagcttttggttgcatctggctgaactgcagggatttcaaattgaaaggaaaatttatgaatgtaatcaaattgagaagtctgtcacccgtgggtcctcagtttcattacttcaaacaaatcttccttgtgtcaacaccagcatttctaatatatacaggaatgattttatgcatccttcattactcacacaagaccagaaagcatacattagggaaaaaccttacaaatgtagtgattgtggcaaggcctttaatcagaggtccaaccttactacacatcagagaatccatactggacagaaaccacataaatgtgacatatgtggcaaaggtttcaggcgaattgcaaacctagcaagtcatcatagaattcatactggagagaaaccttacagatgtaatgagtgtggcaagaccttcaatcagacgttcaaccttactacacatcagagaatccatactggacagaaaccatataaatgtgatagatgtggcaaaggtttcaggcaaattggaaacctagcaagtcatcatagaattcatactggagagaaaccttacagatgtaacgagtgtggcaagacctttaacaggatgttccaccttactagacatcagagaatccatactggacagaaaccatataaatgtgatatatgtggcaaaggtttcaggcaaattgcaaacctagcaagtcatcatagaattcatactggagagaaaccttacaaatgtagtgattgtggcaagacctttaattacaggtcccaccttacaagacatcagagaatccatactggacagaaaccgtataaatgtgatacatgtggcaaagatttcagtcaaaattcataccttgaaaatcatcagagaattcacactagagagaaatcttacagatgtaatgagtgtggcaagacctttaataagatgaccaaccttactacacatcagagaatccatactggacagaaaacatataaatgtgatatatgtggcaaaggtttcaggcaaattggaaacctagcaagtcatcatagaattcatactggagagaaaccttacagatgtaatgagtgtggcaagaccttcaataggatgttccaccttactagacatcagagaatccatactggacagaaaccatataaatgtgatatatgtggcaaaagtttcagtcaaaattcataccttgaaaatcatcagagaattcacactggagagaaaacttacaagttgtaattagtgtggcaaagcctttagcgtgcgctcaaacctaactaaacatcaggtcatccataatggagagagaccttataaatgtaatgagtgggacaaggcttttttttcagagttcaaaattgtaaaacatcacaggattcattctggagagaaacaaaacaaaagtaatgaatgtagtaaggcatttattcaaaattcaagtctggtggaccatcagagaactcacactggagagaaaccttacaagtgtaatgagtgtggtaaaacctttattgggcattcaagcctaactaaccatcaggtaattcatactggagagaaaccttacaaatgtaatgagtgtggaaaggcttatgtgaagtggtcccaccttagacatcatgagagtattcaaactggagagaagccatacaaatgtaccaaatgcagcaaggcctttagacaatgggcggacatcaggattcaccaaaaaatctatgctggagagaaacctcacaagtatgatgagtgtggaaaaacctttacccaggcctctcacctcactatacatcagattatccatactggagagaaaccatatgaatatgacatatatggcaaagtcttcagtcaaaattcacatttcaaaagttatcataggatttgtactgaagagaagccttacaaatgtgtgtggcaaggtcctcagtcaaaattcacaccttgtaaatcatcagagaattcatactggagagaaatcctacagatgtcatgaatgtggcaaagcctttactcaaggctcacgcttcattaatcatcagatagttcatactggagagaactttccaaatgtactgaatgtagcaaggcttttaagaatggccctaaactcaggactcaccaaatagatcatacttgtaaatgcaatgaatgtagcagtgttttaaagtagtgcttgctactcattagataagagtatctaatatatcttggggcaaaggcacacaaatgcaatgtctgtgacaaggattttatctgaggatcaaaagttggggaacagaataattcgtactggggagaaaccttagaaatccaatgagcatgggaaaaactttaccatgagttcaagtactacaagacatcagagagttcatattgaagagaaaccatgtaaatataaggtatgtggcagaggctcttttcaggtttcacagtgcactggacatcagagtatacatcttttgccgggcgcggtggctcacacctgtaatcccagcactttcgggaggctgaggtgggtggatcacctgaggtcaggagtttgaaaccaccctggccaacatggcgaaacgctgtctctattaaaaatacaaaaattagctgggcgtggtggtaggtgcctgtaatcccagctactcaggaggctgaggcacgagaattgcttgaacctgggagatggaggttgcagtgagctgagatcatgccactgcacgccagcctgggcgacagaggaagactccgtctcaaaaaacaaaacaaaacaaaaaaacagagtatacatcttttagagaaatcaaagtaacatgcatgctaaagcttttttttttttttttttgagatggagtcttgcactgtcgcccaggttggagtgcattggcccgatcttggctcaccacaacctccgcctcctggattccagcaattctgcctcagcctcccaagtagctgggactacaggcgcgtgccaccacacccggttaattttttgtattttttagtagatacggggtttcaccatatcggccaggctggtctcgaactcctgacctcgtgatctgcctgcctcagcctcccaaagtgctgggattacaggcttgagctcctgcgcccagcccatgctaagtcttttacccagtggtcaaaactggcacaacacaggatttatactggagagcaacctcacaaatgtaatgaaagtggtaaggctttttatcaaatgtccttgtctttggggtcatgagaaaattcatacagaatctattaaaaatgtactaaacatggaaagacctttaagcaacagtgatgtgatgaaggtggtagttttttaaatgaactcccataagagtctacacaccatagaactcataccaggaatcacaaagtctctaaatttccaaagttaactggaaatattacaaactgcagaataattccaggccaaaatatgttaaattcataacatgatgtatatcaaaggaaaaaaggacatgtggaaatgacacattatcttcagtgtataaaatattcatttatgtgaagtttcttggaaaggctacactactattactggtttccgtctgatgtttgagatctgttgattttatgcttttcttacaggcctttcattatgatctttgggaaggaatcaataaaatgatagggcctacttcattaggtgtggttcattcctattcatgctccctggaagaacaagaatgctgaattttgaaatttaatattgtatgaattagcatcagggagaggtggagaaaaatacaaaactaaaagtcatgcttattgtgttcagtgtgcccttctccagagggccactggcttataggaaaggattgctgctctaccagttgaccaggagatggcacgccaggacattaagacactggagttttgtttcgttttttttttttttttgagatggagtctcgctctcttgacaggcaggagtacagtggtgcgatctcggctcactgcaaactccgcctcccgggttcaagtgattctcctgcctcagcctcccgagtagctgggactacaggcgtgtgccaccacccccagctaacttttgtatttttagtagagacagggtttcaccatgttagccaggatggtctcaatctcttgacctcatgatccgcccgcctccgccttccaaagtgctgggattacaggcgtgagccagtgtgcccggccgacactgggctttttatgagagtgacagattactaggacctcattatgtggtagaagtaatgtaggggaaatggcgattatctttttttaaaagcaatagctgttgtatatcaatgataaatgaaaaattagttattcttgtaaattgaagaaagaatggttatcatagagggtagttcaagtaaaagaaccagggctgggtgtggtggctcacgttctgtaatccctgtactttgggaggccaaggcagatggatctcttgaggccaggagttcgagaccagcctgaccaacatggcaaaaccgtgtctctacaaaaaatacaaaaattagccggacatcgtggtagatgcctgtaatctcagatattcaggagaccgaggggaaaatcacttgaacccgggagacggaggttgcagtgagctgagatcgcaccactgctcgccagcctgggcaacagagtgagactctgcctcaaaaaaaaaccaaaccaaaccaaagaaccagaatagcatgtgcacatatacacagacgtttcacaactggcattatgttttgctactgttttatttacaatgtatcacaagttttatgctttaataaaatttaatcataacttctaatgaatcatgtttcttctgccaccacagttttatctcacctcagttgggtatttcataacagatagtaatagtgcaccattaggctctctaggttgaaggagtcttgcaggggaacatgaggtttgtgctttaactgtggcaactgacatccagtatcctcccctttaatttgttctcatccaaaactaatccatctgtttttctttaataagtgatttttcaagtttgcacttactttttcctttacattacactttaagtaagagtcactgttattagtgctttatgtgtaataacaacctgtgagataagtactgatgttattcacatatcacaaacgaggaaacttagggccaagatgctttaaggactcatccacatccctgtaagtgggtgaatcaggattcacgtttggctgcaaagatgagtgatatagtttggatctgtgtccctgcccagatttcctgtcaaatggtaatccccagtgttggaggtgggacctgatgggaggtgattggatcatgggggcagattcccctgtggtgccgttcttgtgatggtgagttctcatgagatctggttgtgtaaaagtgtgtggcacctccccctctctctcttccttctgctctggtcatgtgaagtgcctgctcccactttgccttccgcaatcattctaagtttcctgaggcctactcaggagctgagcagatgccagcatcatacttcctgtacagcatgcagaactgtggccaattaaacctcttttcttcataaattacccaatatcaggtatttacccaatatcaggtatttcttcatagcagtgcaagaatggaccaatacaatgaatgtgttaaccatggcgatccactaacatggctagttttcttttctttctttttttttttttttttttgagatggagtttcgctcttgttgcccaggctggagtgcaatggtgcgaccttgactcactgcaacttctgcctcctgggttcaagcaattctcctgcctcagcctcctgagcagctgggattacaggtgtgcaccaccaagcccggctaattttgtatttttaatagagatggggtttcaccatgttggtcaggctggtcttgaacttctgacctcagatgatccacccgcctcggcctcccaaagtgctgggattacaggtgtgagccaccatgcccagcatggctagttatttctatctttcatgtacttgacatcttgacttaattttgttagtatcttttgtcatagtggtttatctttacacataattgtgactgtagtaagtattacatctatatttttatttcatgggccaaattactataaatacatacttaaataagatataaatacactgattaccacataatcccagaagaaagattgtccaagatgaaattgcatttattgacccaagaatggttcacaatttatgatggagagagattttcctcaagcaaggaacaagattcaaataccagctgttgaaataattgcacaatattgtgagctaagctatagaatctgaaatgtaagacataaaacattggccaggcgtggtggctcaagcctgtaatcccagcactttgggaggccaaggtgggtggatcacaaggtcaggagatcgagaccatcctggctaacacggtgaaaccccctctctactaaaaatacaaaaaattatctgggtatggtggcacatgcctgtagtcccagctattcacaaggccgaggtgggagaatcacttgaatctgggaggcagagtttgcaataagccaagattgtgccactgcactccaggctgggcaacagagtgagactccatctcaaaaaataaataagtaaaaaaaaaaaaaattttagcgtacagactaaattattgattttagataatataattatttgttcattaatggatggctattaacagcaactttattataattaatgtaataattgaaatatactcaaaagatgtaaaattgtacctggaagatacggaaatgtgttcattaagtaaattgatatagttagatttgtagtgagttcagagttaacactggaatttaaaaaacaggtttgttgagatctaatttatatccataaaattgtttcattttaagtatataattcattgacttttaatacacttgctataagttgtgaaaccatccccacattcaaatcttagaacatttctatcagctgcccccgaaaagatattttttaacaaaaaaaaagaaaaatatcacatgatatatttgaatgtgtaaactgccgaagttatattggtatgaaagccacactggtgacattaacgttttctaaaatgtttcttttgtgaactccggagggaagttactctcactgtagtcaccagacaatagagatgtcctgtttaaatgcaattattgtctccgtttagcacatggtaaggccagcattggagaaaagacgcatattctagccacgttcacccagacacatagtttctgtaataatgagatcactgtattccatttttaacgtcattgtatgcatagaggttttacaataattactctattatcctgaaaataatatcagggactcttgtatggcagctaaatcagagtttaaaaccacagaaaagtttaatctcacattgaatgctacatagataaaatatcaatagtcaccatcagggattggtgtgggggataggacctctagtctgtctccacagactcagtctgtatctcagaaattatttctcctacttttgtatctttgccacaggaatagtttctactccagaggaatctcctttttcagatgtgagcactcacagagacccagcatactcctgtttcccttacatacagactctgcctcacattctaaaatagaaaatactcatctgatttcttcttactgccaggactttgggcttagtatgatgtcctagtgtgtgtagggggagggagccagccagtctctgagttatgagtttgtcatttgagataccatcttttcatagaactacaatggtcaattcaccatgagtgcatgcttgcttctgaaaaacttttcattaccaattatcagaaacaacttcaagttcctaatgaacatcaccaaagagatatttggagtgttatgtagaggccgttctatttccaagatccgtgaagacagactgtggctcttatggaggaagcagaaaatgctgaggtctgaacacctgatggacagtaatgctgaaaatctttgtatttgcctattgggtttgtggatctgcttcagtgaaatgttcttaaatatctttgcctttttctaattcatttttaatagactttttaaacagcagttttaggtttacaacaaaattaagtggaaggtagagatttcccatatacactgtacccccacgcaaggacagcctcccccattattaacaacccaccagagtggtacatttgttacaatcaatgaacctccattgacgtatcattatcacccaaagttcatgtttacattaaggttcacttttgtgttgtatagtctgagtctggacaaatgtatgaagccatgtattcaccatcatggtatcatataaggtacttttactgtcctcaaaatcctctgtgctccacctagattgtcttccttctttcagttctatcacttgtttcacacgttttgcagctctctgtcctatattgtcaattattcccaattaattatcaccctcctatgaaattatacaactctgccctttgatatcaggcatggcccttgacttgaggcaatgcttcaagtcaaggattgaaattccttgcccaatttatgataggcttggctttgtgaattccttggccaatttggtgtgagtagagatgacatgtttcaatttttaaaaatatttttttttaaataagaaactatcaataagttggagaaactgtcaacttatttgttgattgtccgtgtcaattttctctaattaatttataatcatttagactattttcagctccttaaaaaattgtttctcatgggtatgtcctttggttgatataagccaccttcctcaagtaggtcaatgtcattcttgtagcttttttctttattcttaggcttattgcaggaatgatataaaattctttgctcagagaaaataactaaaactcccccaaaggcagttgactcaccagagttctcgaatgacttggaaatcggtaaaatgcagattcccaggctgcatcaagcccagctgaattcatctggacagtgtttttgttttcaacagttttactgagatgcagctgatacatagttatgcaccgcataacaatattttggtcaataaaggactgcatatataatggtggtcccattagaatactgtatttttaccataccatttccatgtttggacatgtttagatacacaaataccatggtgttacaattgcctatgataacatgctgtccccatttgtagcctaggatcaacagtctatatggtgaaaccctgtctctactaaaaatacaaaaattagtcgggcatggtggtgtgtgcctgtagtcccagctgctcaggaggctgaggcaggagaatcgaaccatggaagtggaggttgcagtgagccgagtctattgtaaattattgtaaaaagtctatatggtttagcctaggtgtgtagtaggcgatcccatgtagctttgtgtaagtacaccctatgacgttagcacaatgatgaaatcaacaaatttctcagcacacatcctcatcattaggtgacccatgactgtgctataaaaggctgcacatattgagggtgaggtcagcttggggccccacttgctcagggggcaggctctacccagacagctggcacccctcagctatatgcatccatccttaggcagggaaaactcaagagtcatctctactccctgctgtgcgcaaccctttgagtacctggttctgccaagaaagctacaaaattgtgcggctccagggcagcaactcgtggatcatgctcccgaggcctggtgagagaaacttgcctgttcgaatttaaatggaagctagaagaggcttcatttgcttcttctaaccctctcttttctctgctactaatatggtatgtcctgatagagactgaatcttaccctgaatcccagcatcgcattgtggaactaagtgctgaataataatagttctgaggaagaaataaacgtttgttcttgcaagcctctgagaattcaaagatatttgctaccacattacaacttccagaaagctgaaagtacactttcaatgacctgttttttctttactcaccttaaccttccaaatccacagttacagatagtagctcattatctccactacttgtacgaactttgaaatctgcatttgagaattttcttcatatgattactttcttcctttccgttttatatgttttacttccattagaataaccatttattttaggctgggcgcagtggctcacacctgtaatcccagcgctttggatttgtgctttggcgggcagattacaaggtcaggagtttgagaccagcctggctaacatggtgaaaccctgtctctattaaagatacaaaaaattagctgggcatggtggcacacgcctataatcccagctactccggaggctggggcagaagaatcacttgaacccgggaagcagaggttgcagtgagccaagatggcaccattgcactccaccctgggtgacagtgcgagactccgtctcaaaaaaagaaaaaaaaaccatttatttttaattcatctagaaatatattaccttttattatgtgaccaccctcaatgaactatttgttctctcacttataactttacccaattggtttatcatcatcagatatttgtaaatatcttcaagaaacttgccctctttcaccctgcctccttcaccttactaatcatcagaatcagacatgctcagttactgactatggtccccttacaatcaggaagttcacattgatgacaaaacaaaaacaaaaagaaaaccccaagcaaacaaacaaattaaaaaaaacctctagctctactaaaaatacaaaaaatagccctctccctctccctctccctctttctccctctccctctccccacggtctccctctccctctctttccatggtctccctctgatgccgagctgaagctggacggtactgctgccatctcagctcactgcaacctccctgcctgattctcctgcctcagcctgcccagtgcctgcgattgcaggcgcgcgccgccacgcctgactggttttcgtatttttttggtggagacggggtttcgctgcgttggccgggctggtctccagctcctagccgcgagtgatccgccagcctccgcctcccgaggtgccgggattgcagacggagtctggttcactcagtgctcaatggtgcccaggctggagtgcagtggcgtgatctcggctcgctacaacctccacctcccagccgcctgccttggcctcccaaagtgccgagactgcagcctctgcccggccaccaccccgtctgggaagtgaggagcgtctctgcctggccgcccatcgtctgggacatgacgagcccctctgcctggctgtccagtctggaaagtgaggagcgtctctgcccagccacccatcgtctgagatgtggggagcgcctctgccccgccgccccatctgggatgtgaggagcacctctaaccggccgcgaccccgtctgggaggtgaggagcgtctctgcccggccgccccgtctgagaagtgaggagcccctccgcccggcagccaacctgtctgggaagtgaggagcgtctccgcctggcagccacctcgtccgggaaggaggtgggggggtcagccccccgcctggccagccgccctgtccgggaggtgaggggcgcctctgcccggccgcccctactgggaagtgaggagcccctctgcccggccaccaccccgtctgggaggtgtacccaacagctcattgagaacgggccatgatgacaatggcggttttgtggaatagaaagcggggaaaggtggggaaaagattgagaaatcggatggttaccgtgtctgtgtagaaagaagtagacatgggagacttttcattttgttctgtactgagaaaaattcttatcctgttgatctggaaccttacccccaaccccgtgctctctgaaacatgtgctgtgtccactcagggttaaatggattaagggcggtgcaagatgtgctttgttgaacagatgcttgaaggcagcatgctccttaagagtcatcaccactccctaatctcaggtacccagggacacaaacactgcggaaggccgcagggtcctctgcctaggaaaaccagagacttttgttcacttgtttatctgctgaccttccctccactattgtcctatgaccctgacaaatccccctctgcgaggaacacccaagaatgatcaataaaaaaaataaaaataaaaataaaaaaataaaaaaaaaaacctctaggcttaggggctttgtgttaaatgcgagttacaataaaattgccgacgttcatccaagggtgctgtttcccaatgtgtcatacggcaacagaaaatgtcttccaactggggtgtttagaccacttccttttaaagtgattattatatggttaaactatcttggtattggttttgtttttgcctttgttctttcttctcttttctttcgttgccttgggttttgttttgttttgtttatgtagactggaagtccatattttatttctctagtgacatatttacagttcaatataaattaaaggcctgcttgtatgccaaatccaggtcccttgggtggttcagtcaaaggggtaagacctccagctggctcacaagagaagcgtccactccttggcccaggttttgggattttgccagccttgagctcatcaataatttcttcaatatccttagctgtcaaatcttcatagtaattgtcatttatttgaaccattggtgcgttcacacaggcccctaaacattccacttctacaagagtgaaaagtttgtcaggtgtagtctccccaagctttattccaagctttttctgaatggcctccagtatgctgtcagagtttggaagcatgcagggtgtagtagtgcagacctgaatgtgatacttttcaactggctttcgattatacattgtataaaaagttgctacttcatatactcttattggaggtacttgtaaaacttctgcaaccttgttcatagcagagatgggcaaccacccattctgcctttgggctaaatccaggactggaagaacagctgctgctttatggccttctggatagttttttacaattgcctctatcctcttatagttttctggtgtgaaatcaaatggagtatcagggttattctcaggagtatctctgtgcacaaataaagctcctccagctccattttgcatagctgtcttatgcaattcctcacatgtcttccggtggggctgcagcggcctccctaagagggctaaggccgtagtgtccttgccgccgcctgcaggcccgtgtagagcccagggctctcctgcgcccaaaactaagggagacacggagagcaagagaagggcggcggcagcgccgggctcagcttgagcctccttacccagtgggcggtaaggccagcggcccgggcccggagcgccgcggagaaggcctttgggtttttaagtggctctcttccaattccttttttggctttagtgttaacgataaccaaatttttagcatttgctttaggggggttatactatacagcttatcacagcctaccttccagtgattccatacgacttcatgtaaagcatcagatccttacccatgtatactttcatttcacaactgttggtgtgtgtgctgtcattatcatacatctaacttttagataacctacaagtggctccagggcagcaactcatggatcatgctcccgaggcagattgttattttctaaacagttacattttaaagagatttaaacggaagaaatacgtttaaaaattacccatgtggggccgggtgcgttggctcacgcctgtaatcccagcactttgggaggccgaggcgggcggatcacgtgaggtcaggagttcgagaccagcctgaccaacaaggagaaaccctgtctctactaaaaatacaaaattagccgggcatgctggcgcaggcctgtaatcccagctactcgggaggctgaggcaggagaatcgctggaacccgggaggcggaggttgtggtgagccgagatcgcaccgttccattccagcctgggcagcaaaagcgaaactccgtctcaaaaacaaaaaacgaaaaacaaaaacaaaaacaaaacaaacaaaaaaattacccatgtggttactatttctggcactcctcattcttttgtgtagatcatgtgttacgaaacacaagtcaaatatgaattactgagagaggaggcagggcttggactccagaccagattgaaaactagctgaaacagggaagaggcaaaagcacctctccataagacacgccccccattgccatgtcagtttaccactgccatcgcaacacctggaagtgaccacccctttccaccgcaatgacctggaagtgaccacacccgttctagaaatttctgaataacctgccccttagtttgcatgtaattaaaagtgggcataaatatgactgcagacctgcctctgagctgctactttgagcacactccttttggggtagccgtgccctgcaaggagccgttcatctgctgctgctgttgccgccgctccaataaaagttgctaccccactttgggaggctggggcgggtggatcacctgaggtcaggagtttgagaccagcctgaccaacatggtgaaggcccgcccccatctctactaaatatgcaaaaattagctgggcgtggtggcacaagcctgtgatcccagctactcaagaggctgaagcaggagagtcgcctgaacctggaaggcagaggttgcagtgagctgaggtagcgccattgcactccaggctgggcaacaagagcaaaactccgtctcgggggggggtgggggggaggtgctacccactaccagttcacccttgaattatttcctgagcgaatccccagtctgggggctcacctgccctgcatcatcaccatctgtttttaaataatgtttacttggaacatggccaaacccacgtgtaggtactattgatccattaaaggcagagtagggtatttgcaaccgtatagcctgcaaagaataaaataccacttggccctttaaagtttgtcgatttctcatgtagagtcatattctcttttttcttttgagaccgagtcttgcttttgtcgcccagactggagtgcagtggtgtgatctcggctcactgcaacctccatctcctgggttcaagtgattctcctgcctcagcctcccgagtagctgggattacgggtgctcaccagaacgcccggctaatttttgtatttttagtagacatgggatttcactatgttggccaggctagtctcgaactcctgacctcaggtgatccacccgcctcggcctcccaaagtgctgggattgcaggcgtgagccaccgcgcctggctgagagtcatattttcatcacatatctgaattacaataaagttggggcaataaagcgtacagtcagttttgtaatccagtgtaaggggaacacaaggtttctcctaattggaaaagaataactggtaggtcttttcccttataccagggaaaacataggaaatacgtgattgtgttgctatttgatttgaaactacagtaatggctgggcgcagtggctcaggcctgtaatcctggcactttgggaggccgaggcgggtggatcacctgaggtcaggagttcgagaccagcccaaccaacatggggaaaccccatttctactaaaaatacaaaaaattagccgggcgtggtggtgcatgcctgtaaccacagctactcagagaattgcttgaacctgggaggcggaggttgcggtgagccaaaatcgcaccactgcactccagcatgggcaacaagagcgaaactccatctcaaaaaaaaaaaaaaaaaaaaaaaaaaaaaaaaaaaaaaaaaaaaaaaaaaaagaaagaaagaaactacggtattttatgtgaaaataatttttgatgacattgacagtaaagataaaaactggggcttaaaaactccactaattttacttgacatgcattcataagaggaagtagcaacatacccctaagtggccccaggggtagatggcagaggtgtgtatcctaacaagtctttgcagaactggtatcatcaaatctctcagacagttttgacaaatggtatttactatcttttcattaactcattacctcaccctacccccacgtctccccagcagctgagaggctcctgtaaataaatttgtctgtgcattccacaaataggtcatcatgattctggatccacacttgtatcttaacccctctaggaaaagaattgttacaagaatcaacgtgcaaaaatataaacagtttatataggtgttttgacttttaggtcccccgaaataaaaaaattgtgaaccataagaagtctcaaattttaaatgtctccaacagatatgatcacacacctcaccaagccacgcgctgattgtggatattcctcaatcattataaacatgttcccatcctgacaattttctccatttcctctgcccaattatttttccccatttgtatctatatgacagagtccaattactgattttgctcaaatatcatcttatcctatgggtatttcctgaacagtttaaattaggacatcctgtcactctgtcactacatgtacactttgttgaacttatcctcctattataattattgctgacttacccgtatagaacataagatacttgagagcagggaactggttcagtttcttgctagatcatcaatgattagaataatccctgagagcagggactctgtgcgtttgtattgaatgaatgaatgaacgaatgaacgaatgcatttttttcgatgcaaagaagaaagttactgcaatgcataggctcgtagattagcaggtcataattctacttttattcccacattttgtatctcaggcaacatgaactaaatagatccacctcagcagtggaaaaaggttttcatgaagtttttctaagccatgaaaatggaagattcactctcaaatgctgcattctattcccagtgaaaaataacaatcttatttgtcaggtagaaaaatttttgtaacgacaatctgaaaaacagggactaaaaaacaagtaggaagtttatctttctcacataatagcaagtccggaggctgcagtttgggatgtggcagatcctcttgagaagtccattctgcctactctacctccatcagcactcagccttccttctccttgaggagaatgcagatggctggtgtatgactgagaagggtataggataaggggcaaaaccattttcattttgaggctttgtcttgtttacctgaaaacaatatttccatatttttttcccaaagaatattaattctgttaaatggctactgtaattttaatgaagaacggggattttcaaatttcatattcacacatcaaaaacagaggaagagaaagaaacaattaagttagaaagccaggaacagtggctcatgcctgtaatcccagcactttgggaggctgaggttggaggatcgtttgagcttgagcacaggagttcaagaccagcctgagcaacacagtgagacctcatctctacaaaaaaattaaaaagttagccaggtgtagtggcaacacctgtggtcccaggtactcgggaggctgaggtgggaggatcatttgagcccaggaggttgaggctacaacaagctgtgatcacactactgcactgcagcctgggctggacagagggacaccctttctcaaacaacagcaacaacaaaacccacaaacatgttgcagaccaaatacctgttaccaattatattaatgacaacgtggtcaccataattttgggaagagccagattacattaactgactttgttctttatcctgagagtctaatattatatatagcctatcgcctgtcttttgggtgttcaaaaagaaagacaaaaattattaaacgtccttactgtttttttttaacttacagatttacttctattgagctctatttgtatctaaataaaaatatttctccaagttttaatatattctaattccactatcaaggtaggaaaatgaatttgagatttaaaaaaaaattcatgccctcttaccttaaagtgagagaggtaaacacttccaaatgtattttcatattagactataaccgaaaggtaatctgttatatcataacttggggattttcagagggagcctatatttccaatgaagcattaaagaccttcacaggatttccttgcatatatagaatatactcaattgagggtgaacatttaaaatgtttaaggctatatttgttccaaaaaatgaataatcccatcttgttttagttttcaatttgtttagtttccctttttattcgttgcttttccacatgtaaaatatttttgtctctaaagtcaaaattatattacaaatatatgaaaatccctattctgttttgccttctcaaactttttattttcttaaataggtttcttgataggtattaatttcagattttttttatcacaaagagaataccatatatgatattctataccttgttttttaggtatggtggtgatcactccaatatgactttcctcattctttttttttctttttttttttttgagatggagtctcactccgttgcccaggctggagtgcagtggcgcgatctcggctcatgcaacctctgcctcccgggttcaagcgattctcctgcctcagccaccagagtagctgggattacaggcatgcgccaccatgcccagctaatttttctatttttagtagagacgggatttcaccatgttggtcaggttggtctcgaactcctgaccttgttgtgatctgcccacctccgcctcccaaagtgctgggattacaggcatgagccaccgcgcccagccctgactttcctcattcttttaacagcttcacatacatagccaacattcccctaatttctcagccaccttgcctcaagttaaaaccatgagaccggttttgccaaacagggtgtaagtgtaatgtatcactttcaggccaaaccacttaaaactaagtgtgaccttcttgcttgtttcctttgcaataatcagaggcccatttttgagatagagaaaccataatatggaagcccctccatctctgagttaccacataagcatcagttgccctacagggtcaactatcccagtggtgcaattgacagaaaagactcattttatacagtaagcttccaggatttaacaaaaaaggttttgtatctccgggcaccacaggacatgccattccttacaagacttttaaaagcaaagcctagacagctttagcaataccctctttcttgacaaactgttagagatctaggcctgaagggcaaggaaaggacaataaagtctgtctttctacatcatttgcttctcagtgatgctcatcaaattgctatcaatcactgtgtcatgtttccactgccaatttttttagatattcacaatacagcccccaaaccccaacctatcctgtgtcttagtccattttttgttgctgtaacagaaaacctgacctgggtaatttatatgtatgtatataatttatgtatgtgtatatatataatttatttcttccagctctggaggctgggaagtccaaggctgagcggctacatgtggtgagggccttcttgctgcatcataacagaagtcatcacatggtgagaaggaggaagcatgccagctcagctctcttttcctcttcttataaggctactaatcccaacatagggagccacccccataacttcatctatccctaattacctcccaaaggctcccacctctaaataccatcaacatatggatttgaggattcaatttccaacatgaacttttggggaatacatttgaacatggcacccagtcaccatttcctaaaagaataatactgcaggtacccaaaacaactgaacaaagacattaggcaccatttgcattccctctcaaagtttctaaaaccatctccagttttgaggtcaatatgtctcagctacttttctatactgcaatgtcctttgtccacttaacagtaccaccactgcaatctggtgctcagaactgttttccagaaggcgtttcctgtatggttcttgctaaactttgccaatgagaaaaacctgaatgggccaggcgcagtggctcacaactgtaatcccagcactatgggaggctgaagtgggtggactgcttgaggtcaggagttcaaaaccagactgggcaacatggcgaaaacctgtctctaccaaaaatacaaaaattagcccgtctcttaacccggtctcaaaataaatagataataaattaaaaataaaaaaaaatttaaaatgctgttaaaaaaaaaaaaaaaggaaaacctgaatggaataggaaaggcagaagtgaagcactaagccattaatctcagatgaatactgcacagacctcaccatctctaatcccaatcaagcagccagaagcagtaacttctaagacatctccatgagctctggtttctcactgaagctgccagtgactatttttctttgatattcctgctggagtcttccacacctttcactgctcaagcacctccaaaattctttttattttatttttttttttttgagacggagtctcgctctgtggcccaggctggagtgcagtggcacgatctcagctcactgcaagctccgcctcctgggttcacgccattctcctgcctcggcctcctgagtagctgggactgcaggccccccactaccacgccccgataattttttgtatttttagtagagacggggtttcatcgtgttagccaggatggtctcgatctcctgacctcgtgatccgcccacctcagcctcccaaagtgctgggattacaggtgtgagccaccgcgcccagcaaaaattcttaacatataactattcttattcttgaagtaattgtatacgttttcctaaacacagactaatacaatcattcagaataaagctaattccatgttttcaaagtttattcatcacaatctgtattactgtattggtcctgagtctcactctgtcactcaggctgagtgcagtgtcagtcatggctcactgcagcctcaacctccctgtctcaagcaatcctttcacctcaacctcccgagtagctgggactacaggtgcatgccatgacacccagctaattttttattttttgtagagatgtggtctcactatgttgcccaggctagcctcgaactcctggacacaggtggtcctctctcctgagcctctcaaagtgctgagactacaggtatgagccatagaacattgccaactttgccgaaatccagaatgctatcaagaaagtggaaaaacagtacacagaagtggaaaaagtactggcaaatctcataagggtgtagtattcagaatataaaataactcataactgaaccaaaaatacacaatctaatttttaaaacattaaaagaaatgtctgagtagacatttctccaatgaagatgcacatggctaataagcataggaacagatgctcaacattcatcattaaggaaatccaaccacaatgaaatatcacttgtaagtgactagaaggctatatactactactactgtgaacccaacaactacaaacatcaataatcgataggaagtgcagaaaatggaacactggaacatcgctggtagaaaagtaaaatggtgcagctgccttcgaaaacagtttggtgaatccacaaaaagataatcactgataattactatatgacccagaaattccacgtttacagacatacccaagagaagtgaaaacatgtatgtgcaaaaacatcttgtaaaaagttgttcatagcagcattttccataatagcctaatttcttttttttttgagacagagtctcgctctgtcgcccaggctggagtgcagtggcgtgatctgggctcactgcacgctccgcctcccggattcatgccattctcctgcctcagccttccgagtagctgagactacagatgcccgccaccaggccagctaattttttgtatttttagtagagacggggttttgccatgttagccaggatggccttgatctcctgacctcgtgatccgcccatctcggtctcccaaagtgctgggattacaggcatcagccactgcacctggcccataatagcctaatttcaaacagtagaaagagttcaaatctccatcaaataatgaatggacagacaaactgtagaatattattcagcaacaaaaagtgatgaggtattaggctgggtatggtggctcacacctgtaatcccagcactttgggaggcctaggcaggcagatcacttgaggtcaggagttcgagatcagcctggccaatatggtgaaaccttgtgtctattaaaaatacaaaaattagctgggcatggtggtgcatgcctgtagtcccagctactcgagaggctgaggcaggagaaccgcttgagcctgggaggtggaggttgcagtgagctgagattgtgccactgcactccagactaggcaccagagttagactctgtctcaaaaaaaaaaaaaaaaaaagttatgaggtactaacaaatgttaattttgggtgggtggtattttttatagtgacagtttgcccaggctagtctcgaattcctgggcttaagcgatccgcccatcttggccttccaaagtgttagaattacagacatgagccactgtgcctggcctagaaattgattttttttttggacagggccttgctctgtcacctaggctggagtgcagtggcataatcctagttcactgtaacctccaactcctgagctcaaggaattctcctgcttcagcctcctgagtagctggcactatagaaatgtgccaccatgcccaactaacttctaaatttgcagacagggtcttgacatattgcctatgctagtctcaaactcctgggctcaggcaatctcctcgcctgggcctctcaaagtgctgacattacagatgtcagcctccctgcccagccggctagctgaaaatttaaaccacagatgagtattcactccagccccaccagataaacatcataacaccccaagtcaatcatctttcactgccttctctagccattttttaaccagcttgggaagtctaccctgttctctccagaaagccttttgtaataaacattcttataatactttgatgtagagtaccaccaatcctgaaatctaaaccaaactttgcacggggttccctcctgttccagtggagtggcgacaagtgcaaatcagtaaaaaaaaatgttttgggggtaaatacatgaggtttctagtttctttaaaaaaaaaatccattgcttatgttcattattaaggggaaactcatgaacactgatttttttcaaattatttcacggagtgctccaagtacaaaaaaagaagttgtgttattatttcagaaatttcatttactaataattttcatatgcttacatttgttattttcctctcatgtaaaaggcatgcagaaataaagttatgtagaaaaaaaggcatgtagaaatataactgcacagtgcatattcatgaacaggaagacaggtttcagggggtctgatattgtcccactatggcatggcattttcattatagccatagaagtcatctagggcagagtgtggagaaaatatttcaagtgcaaattatgaatatatacttcttaaattgtatactgtttgaacataacatggatagaaattgttatagatgacattcaaccttgagagtctaatgatgtattatagtgtttgatattaagtgtcccaatgaggtgggatatgcttgggttgacggaaggcacacgattcattcagggttactaaaaatgattatattttactaattaagacataagaagtataatatattctaaataaaatggtatcaaatgcaatctcaggggccaaatgtgaatcccctataagaacactactctggttcttttgatggaactgtcctctatggtaaccattctctcttcagtttccaaaaataagacctatctatgttcaataatctgtgatatgcaacagtaactacctttcaagagagggtgactatcattccccctccatttctttctaccacatatgcagtctctagtaaccgaccatttcacttccatgaaaatctctcaatgtcccaccctactcttcttgtttcatggtcatcttgtactgtaaccaatctctcctataatcgacaaaggtccccagtcacatcaacaattctaaggggtcctgaccacataaagcatatatgttagacaatagttttacctctcttctggcacaaacccccatgctcttatagtatattgtatattagtgttcttggctgggcacggtggctcatgcctgtaatcccagcactttgggaggccaaggcaggtggatcacctgaggtcaggagttcaagatcagcctggccaacatggcgaaactctgtctctactaaaaatacaaaaacaaaaaaacaaaaaactagccaggcatgatggcgcatgcctgtaatcccagctactcgtgaggctgaggcaggagaattgcttgaacccgggagacagaggttgcagtgagctgagatggtgccactgcactccagcctgggtgacagagcaagactctgtctccaaaaaaagaaaaaattagtgttcttgctttttccaggtttcagtaatataaagaagccacacctaaggaagtagtcccttccatcttacatccattccttgagacaatcatgataaatgaaaagcatgccatgaagatttaacagcaacagatttcatacttttaaaaatatgaaataactgaataaaaaatttttaacactgaagttacatctttccacagatgtccttgctcctctgacacacaccatgagtttgtgactttttaaaattgtctgtgaatttaacatcaatcacttaatcttcaagaaggaaaaaagacttagttccctctagcctgaatttttgtatgacaaaatgcttgcatataaggatgaatttccattgagaaatttaaaataatttaccaccttcacttgtaatgcttctctccaatatgaatggtgtatcctgaagtcagaacattgcttaaaggacttgccacatttgtatggtttccatcctgaatgtcttctgttataaccataatagggtaaatatttttataaagctgttcacattcattatatttgtaaggcttctctacagtaagaattctatgatgttccacaaggcttgaactttggataagccttgccatacatgttatctttgtgtggtttatctcaaagatgtatattctggtatcaagtgagacataagccatagctaaaggctttaccacattttcgttttatatggtttcttttcacaatggagcccctgatgctaggtacagcttgaatacttaatttttgtctcattatatttgatatgtttttctctattataacttttttgatgatctccaaggtttgaactttggaataaagcattaccatgtatattatgtttacaatgtttcttttcaatgtgtattttctggtgtctagtgaggtttgcaaattgggtaaaagctttgccacattcagtacatttgtaaggtttctctccagtatggattttcttatgctgagtaagatttgaacgttcagtaaaggctttgccacattcagtacatttgtaaggtttctctccagtatgagttctctgatgaccccaaaggtgtgaacgtttgataaaagctttatcacatttattacatttgtaaggtttttctccagtgtgaattctctgatgttccacaagacttgaactttggataaaagccctgccacacacattacatttgtgtggtttctctccaggatgtatattctgatgcctagtgagatgtgagcactgcttaaaagctttgccacactcattacatatgtaaggcttctctccagtatggattctcttatgttgggtaaggcttgaacgttcagcaaaggctttgtcacattcattacatttgtaaggtttctctccagtatgaattctttcatgaccccaaaggtgtgaacgctggataaatgccttaccacattcattacatttgtaaggtttctctccagtatgcatcctctgatgacttgcaagatttgaattttgactacagaccttgccacatatattacattgatatggtttctctcctgtatggactctctgatgcctagtgaggttcgaacactggttaaaggctttgccacactcgttacatttgtaaggtctctgtccagagtgaattctctgatgattagtgaggttcgaacttttgctaaaagcctttccacagtcattacacttgtatgatttttctctaatgtgtgttctcccatactgtgtatgtaataaagggtatttcaaaatcttcctatatttattacaaatgtttttgacacaaggaggaagtggtgaaactgaggaactattgatagacttctcaactggattacattcatacattttctccccagtttgaaatctctgtagttcagccagctgtgcctgtaagcttaatccaattttattttcaaaacacttcacgtatttgtttccggcataccttatgttatttttcagttttaacaaattccttataaatggcttgtcatggatgaaatactggtgtgcactatctcttatagaaacactctgctttaaagagaaatgtattgaggatttattatgttgttgatcttttctgtgagtgagatttttgttacaggtcaaaggcattcctttgtaattttttacatcatagtcccacaggctgtcaaacttaggcatattttcccagacttccttgaggtcaaaattgttgatgccatggctttcctttctttctaatatcaccagatggtataattcctctttattattttcctttggtgataatcccttgcttgtaaatccaacagaaatatctgaaagatattaaaaaaaccacaggctttccatcaaatagagttgcaaggtaaatattttattaaaatacatattacaagaaagctaagatttacaatgaacagagttatgaagcttctcaactgtctttaaacgtttaacaacacaaagggactagctgtcctcaataaagtaacacagtaacaaaacatgtaacaaattattttaagcacagtttaaaacaccctatagctaaaacactcatactatgtaaatccacataaactctgaaagaagaggtatttttccaccaccactccaaggaacacgtaaattggcatagctatatggtagtctcatatttgaagataaacaaatagtaatgcattatttagtacataattattacacacaaaaggtaaggcacagctcaagcttatctaataaaaaatatttaaaaatgacaattcataattgcaaacaaaacactgaaagaaaaaattcggaagaatttaataaaattttgaatatttacaaattgcaaatgtgagtacttgttataaaactacttacacccatgtagaatgtgcattttgcagcattaacaatttgtgcatggtggttctattgcataatatatactgaaaaaccatcatctgtaaatcattacaaaaataaataaaacactttagtaacctgtgaaaatctaacaggcaagttaatgaacaaccacaattacacaaaattgtcagtgaaattctaaagaattactgcttatgaactacagaaaaaacagaagggacacacaataggaaaaataatatgttgagaatcactaaattttgaaatatcagcttcaggtaaatgcacattactataaagatgaagaattaggaggggagtctgaaataatttcatgcctgcagttatatgacagcagtatatagagaaactccctgactaggaaatgtcatctagttttccagttctatggccaaaaaatacatataatgaaagctgtgtgctttaacattttattatgtagagtcagagaaatgttgatatgaaaaaaaaaattacaaaaaagaaaatatgtaagatataatgaaggcaaaggtcaatctcataagaaacatgacagacacttgacatatcttattcataaaggtaacttttcaaagcatactaaatgctatgcaagttactaaggtctctaacagcactaattgatgtaaatcctcttgaggtaaattatcgcaccttttcataccaaaacaaagggctgaagaggtttacatatctatccctaactcacagagaaagcacatctgaaagccagaatctgaacctgtgtgtgcgggctaagatgccatgttcacagcattaagcaccactggccacccagggcagcacggattataaatcacagcaaatacgaggagtgtaggaagaaatgtttcaaggcagattatgggacctgagctgtgtcacctatagtgtgacagcaccactgctctcagatagcatttaagtcaccttatcttgcacaagttgtttagacagtgaccagatcatgttgctgtcctgagtaagctgtcctgtgtataagcaggagtcattctttacacagtgtgtgcaatgaagggatgttattctgtgctaaaaagaaatgagctgtcaagctataaaaagacatggaagaaatttattttatttatctattttttgagatggagtctcgctctgttgcccaggctggagtgcagtggcatggtctcggctcatcacaacctctgcctcccaggttcacgccattctcctgcctcagcctcctgagtagctggaactacaggtgcccgccaccacgcccggcttattttctgtatttttagtagagacggggtttcaccatgttagccaggatcgtcttgatctcctgacctcgtgatccgccggcctcggcctcccaaagtgctgggattacaggcgtgagccaccacgcccagccctagaaattgaaatgcatattattaagtgaaagaagccaatctgaaaaggccatatactatatggttccaactatatgacattctgaaaaaggcaaatctatggagacagtaaagagatcagtggttgccaggtgctggggggagggagagatgaacagacagagcacagattttttagggcagtgtaattattctgtaagatactattatggaggatatatgtctattatatatttgcccaaacccaaagcatatacatagagtgaaccccaacatcgactatggactttgggtgataatgatgtgtcaatgtaggtttatcaattttaacaaatgtaccactgtgatgggggatggtgataatgggggaagacgctgtgcacgtgtgggggaacagagtatacaggaaatctagtttgctgtgaacataaaattgctaaaaaatagaaagtctatttttaaaaagtataagctaagagttgatataaagttacaggaaacagaagtaaaaggaataactaatactatcctttaacaaagttttggaggttatatatgttttgaggaaactaatactcagacataaatactcaaggaagaaatcttctggtaaaacatataaaacatcatgaaagtatatgaagcagaaaaaaatatatataataaaacaatattcattcatctcatggccccacacactgtagatataaaacaaaaaacactaagagtatcatgaaaacatgtaactgctgattaaatacatacaagttcatttataccaatgacattggcaaaatgaaagtgtcagtggcttaaccaaattatactgaactttaaaaatgtatgcctaattcaactttgtaagctccctcaataaaggcataaaaatcatactgaagaaaaatgtacaactgcacgtatgggatgaataatgtggtatgagcaacagtttggtcaacatgttcgcagatatgaggttgagaacttggagaatgctcttcccaggagaaactcctacaccttgtactgctggctccaagaggatgatcagcatatatctaaccagcgttgtcacactgcccttgggagacactggaaactccacagaaaccagaaggtcagaagcacttatccctccggctgtcctgattctctctcagcatactgggacatgcaggctactctactcagtggcttcaagaggcacctctatgtagcagaatgatactgtgacagattaattaatgttctctttcaagaatgttctgtcaccaaggaaacctcttccatgggagagtccaccaaaagttgtccatcgcctattggtgggttatcacagcagaaagagaggaaatttcagactctaggaatgtgtacttttctttttctttttttttttttcgagatggagttttgctcttgttgcccaggctggagtgcaatggcgtgatctcggctcaccacaacctctgcctctcgggttcaagcaactctcctgcctcagcctcccgagcagctggtattacaggcatgcgccaacacacccggctaatttttgtatttttagtagagacggggtttttccatgttagtcaggctggtctcgaactcccgacctcaggtgatctgcccacctcggcctcccaaagtgctgggattataggcgtgaggcaccacgcccatccggaatgtgtatttcaaaagcaactttcagaggcaaatcttagaagaatatggaatcaggaagactaaggtctccctaagttcccggatagagtagaaagctagaaaagggagagaaataaaaggtacgggagtaaaataaaagggtcggattttgtaggattctaaggaagaggcagtgtgctctgtccacaggctgcaaggtgagaacctaaaagaatgagatatattcccattttggaatggcaatcaaaaagaggatctctctgtcaagtctttacattaatgctgagtaacaatctcaaaagcctgcccattcccctttagacacatgtggcaaaagcagaactgaaggaatggccaaggggcttgaacaagtagagagaccgacagtctttcaaatttcagggaaccccagatacattttgggggagccactgttttcccattttcctgaaaagttcttgcaggtataagaaataggaatagaaattgaataggttctggagccagggctacaaaggccccagctctgatctgtatagactgaaaaccacacatcagatgaaattatatacactaaaagagagtccttaaaaacagccatttcggtccctctcaaaaccaagagaccaaaatggtcagaggggccaaacagtattgtaggtcatgatagcacctttgcttttgtgtctgtatgagttggggcatcacgggagagtgggagttcaaccttttacacatttgaataacagtatgttgggggacagtaggagcgggtgtggaccttgctttgagagctcataagaaataaacttttgttttcccactgatctttcccatttgcagagtttcccaaacaatactcaatggagtagcttactctgtggccatctgagcgcttatttgtgctcacattccgacctacctgattttttccctattttcacttcactttccatagtctaggactctttcctgtgctccaaaatgaacacaatattcagctcaggaaagatttcaacttataaagaaaaaaaggaacatggtatgctgtgcttttcctggatacattcccagccctttgttcagctacgaagagaggacattacacatgggtctgcaaaactatttcccaaaacaatttcataaattagtcaacggactgccttcttctgaatgcttagggattattttaaatatgcagactctgaaaaaactactgaatcaaaggcacagggataaaaccatgataccagacactttaaaacgttttccataaggttttgtaagtactgatattctggaaccaccactcgtcaaacctgattatgcgcagaacttctgaagaaaggggaagtttaaagtctatatgctacattatgaagcctttccactctcaatcaaaaagtttcaatctccccttttagaacagggatcggattcagacaagcacatcagggcctcccaagagactcacaaggaaaaatgtaaagatgtacaagggtggttaccatcttctggagggatgttatcctcatcgagagaaagcaggttcctgtagttctccaacatcacgtccctgtacaaggccctctgggcagggtccaggcactcccactcctcttgagagaattctatggccacatccttgaatgtaaacagtccctgaaataaaaacacacttcaccaagtggacacaggaaaatttcttattttcacacaaaatggcagaaaagaggtgtacatattcactgatttatgtgagttaatgcaagcaacttatatatccctaattttattttttttaaactgagatgaaattacataacataaaattagctatttgaggctgggtgcagtggctcacacctgtaatttcagcaccttgagaggctgaggtgggaggactgcttgagctcaggagtttgaaacagtctggacaacgaagtgagactccacctctactaaaaaatttaaaaaattagctgggcacactggaatgggcctgtagtcccagctactcagaaggctgaggtgggaggatcacttgcacctgggaggtggagactgcagtgggcagtgatcatgtcactgcaccccagtcagggagacagagcaagacttcacctcaaaataaaacaaataaattagccattttaaagtacaattcagtggcatttagtacattcacaaagttatacaccaccacctctgtctagttcaaaaacatttttatcaactccaaaagaaatgccgtacccattaagcagtcactccccatgtgactttaacatgaaataagcttacccaaataggtaagtgacttgcatgctgcaaactatgaaatactaatgaaggaaattaaagcagacaaaacaaataaatggaaagatatcctatgttcaagaacttagaaaattaatactatgaaaatgtccatattatccaaagcaatctacagtcaatgcaatccctatcaaaatcacagtgacactttttacaaaaatataagaaataatcctaaaattcatatagaactataaagacccaaaagagccacagcaattttgagcaagaatatcaaagctggagtatcacacttcctgatttcaaagtatattacaaaggtatggtaatcaaaacagtatggtactggcataaaatagacacacaaaacaaaagtactagaatacaaagcccagaaataaactcacacatatacaatcaactgatatttgacaagtgtgtcaagaatacataatggagaaaagatgctgtcttcagtaaatagtgctgggaaatctgtacacccaaatgcaaaagaatgaaactggatgcttatcttatgccacaaataaaaataaactcaaaactgactaaagactcaaggtaaatttactcaatttaccttgcgtctttagttttacctgaaattgtaaaactcctagaagaaaacatagggaaaatgttcttgacattatcttggcaatgatttcttggatataacaccaaaagcacaggcaagaaaaggaaaaatagaccagtgggactacatcaaaccaaaacacttgtgcataccaaaagaaacaaccaacagaacaaaaaggcaacttatggaatgggaaaatatttgcaaactatatatctgaaaaggggttaatatccaaaaaatataagtaactcctacaactcaagagccaaaaaaactaattacccaataaaaaatgggcaaaagagctgaacagacattttttccaaagagaatataaaaatggccattaggtacatgaaaaggtgctcaatatcactaatcaccaggaaaacgcaaatcaacaacataatatgatctcacatctattaggatgaccactaaagaaaaaaaaggacaagcaatgtctaggatgtggagaaaagggaactgttgtacaatgttggtcagaatatgaattagtgcagccactatggaaacagtacggaggttcctcaaaaattaaaaataggccgggcgcagtggctcacacctgtaatcccagcactttgggaggccgaggtgggcagatcatgagatcagaagttcaagaccagcctggccaacatggtgaaacctcatctctattaaaaacataaaaattagccagacgtggtggtgggcgcctgtaatcccagctactcaggaggctgagacaggggaattgtttgaaccggggaggcagcagttgcagtgagccaagattgtgccactgcattccagcctgggcaacagaggaagactccatctcaggaaaaaataaaaataaaatgaccggctgggtgcagtggctcacgcctgtaatcccagcacttcagaaggccaaggcggatggatcacacggtcaggagattgagaccatcctggctaacatggtgaaaccccgtctctactaaaaacacaaaaaattagccaggcatggtggcgggcgcctgtagtcctagctacttgggaggctgaggcaggagaatggcgggaacccaggaggcggagcttgcagtgagccaagatcgcgccactgcactccagcctgggtgacagagcgagactccgtcccaaaaaaaaagcgaccatgatctagtaattccacttctgggtatatatccaaaagaattaaaatcaggatcttgaagagagataggtacttccatatctattgcagctttattcttaatagccaagtcatggctaaatatccatcaaggaatgactgaataaagaaaatgtacacacacacacacacacacacacacacacacacacacacacactcacacacacgaatattattcagcctttaaaaagaaggaaatcctatttgctatagactacctgaatgaaaatggagtatgttatgtaagtgaaataggccacacagagaacaaatacatgactccacttatatgaggaactgaaaacagtaaaactcatagaaacagagaatagaatggtggttgctaggtgctgagtggggaaatggtgaggtagtaatcagtttcagttacacaagatgaaaaagtcttagagatctcctgaataacacagtgcttatagttaatcctgtattgtatacttaaaaatttgttaagacagtagttcttaggttgtattcttataaaaatatgaaataataaagacagcaagaaaaaaactttctgaggcaatggatatgtttatgacagattgtagtggtggtgtcagaggtatatactgatctccaaactcatcaaattgtatacattacatatgtataggtttttatgtcaatcatacctcaataaggaagttaaaattcatttaaaactgaatttttcagttttccttttattgatttccagtttcactcgattgtggtgtgagaatagttttataagttgtagctttttaaaatgtattgagacttgttctgtggcctgacatgtggtccatcctggagaatatgctatgtgcactagacaagagtgcagattccgtttttgctgggtgcagttttctttccgtgcttgtttggtgtagtttacagcagcagtgtccaaccttttggcttccctgggccacactggaagaggaagaattgttttgggccacacataaaatacactaacactaatgacagctgatgaccttaaaaaaaaaaaaatcacaaaaaaatctcatgttttaagaaagtttaaaaatttgtgttgtgtcacattcaaagccatcctgagccacatgcagtctgtggtccgtgggttagataatcttggtttaaagtgttgctcaagccctttatttccttactaatcttctgtctggctgttctatccattattaaacagagagcatagaattctccaactattatagcaggactgtatctccttgtaatttttgttccaaaatatttggggtgttgatatttgatccatattttttatagcagttacatgttcttgatggattaaccccaatatttactgtccttcaacatctctggtatcaatttttgacttaaagtttatttggtctgctatctatgtagctatccagctaggtttaatatttgcatgaaatacctttttacatccttttattatactttccaggctatttgtgtttagctctaaaggaagtcttttataaacattatatagtgaaatcatagttttaaaaaattattcctccaataagtgccttttaaaggagaatttaatccacttatatttaaagtaactactgataaaagaaccacttttaccattttgctacttgtttttcacatgcctatcttttttgttttgtaattattcccttacttgcttctttgtgtgtataagtttgtgtgtgtatatcatttcggttcccttctttacatttttgttattttcttaacggttgccctgggaattaaaatttccatcagaagctgataataattaagtttcaatcgatgctaagttggcttcaattgcataacaacttctgtttctatatagctctggctggttctctttataatgtcaaaaattacttctctatgcattttatagccagtaacagatttacaattactgttttatacatttttaaatcatatagaaaaaaagtttttaaaaaaccagtaatattggcttttgtatttgtacctacgtaggtgttttacctgtattaatttgtttttatggctttaaggtactgctggtgtccttttacttcagcctaaaagactttgcttaacatttcatgcagggtaagtccactaatgcaaactccctcagctcttgtttatctggggatctcaatttcactgtcaattctgaaggataatttgcctgatactgaattcctgctggatagttctttcgtttcaaactttgaatatgtcattccactaatgtctagcctccatagtttctgatgagaatttggctcttaatctttttgagggtcactgtacatgacaaattatttctatgttgctactatcatgattctcttttccttccacagtttgattatgtgtcttgctgtggatctctataagtttatcacaattaaagttcactgagtttcctaggtatacagattcatgttctttatatatttgggaggtttcagttcttatttcttcaaatattctttctgccttttgctttctccttttcttggaaaattcttattaagcatacatacatatgcttcatggtgtcccaaagctttcttatattgtatttttcttccctttcttctgctcagattaaataatttcaattaacctaaagtttaggttagctgattctgtattctgtcactctactcttgaaactttatagttgaaattttcacgttatacttttcagctccaaaacttctatttcacttctttttaataatttctatgtttttactgatattcgttgaaacactgttgtcctactttcctttagttctttgtccaccgtttacttcagctctctaagcatggttaagatagttgatttaaagtattttttagtaagtgtaatgtctgagcttcctcagaagcatcattaagccagtaatcatgcttcaaattgcccaacctggaggaatcctcacacagctgtagtacagttggcctgctcagaggcagccaatgcggattctttgtaatggagaaaaactgtaaacaaccaatgtgtcttcagtaagagaatgctccaatgagaaagtaaaaactcaagctgtctctgtttaccagcaaaaaaccaaaacaaagacatacagtatacaaatatacaattttgcaaaacagaatatcacaacaaaatattcactaaacattttctaaaattaaattatgatttttacgacttctcttccattgaaaagaatgatcagtagttcctgatggagatagtgggtgatggtggactggacaacataatgttttactttttagtccctaagcatcactgcatgacattttatcataaaaaatatatatatcatgtgatgtttactacaaaagaaatgtagtatttaacaagtagtgtaatcagaatttggctcctgcctctctgatgacagaaagttctgctcacaggtcttagctatattatagccatcttttggctattattttttaattattattattatttttttgagatggagttttgctcttgttgctcaggctggagtgcaacggcacaatcttagttcactgcaacctctgcctcccgggttcaagcgattctcctgcctcagcctctcgagtagctgggattacaggcacgtgccaccatgcccagctaattttgtatttttagtagagacgggatttcaccatgttggtcaggctggtctcgaactcctgacctcaggtgatccacccgtctcagcctcccaaagtgctgggattacaggtgtgagccactgcacccagccccttttagctattattaaaaagtcaaaaaaataacagatgctggtgaggttgtggagaaaaaggaacacttacacaccattggtggaagtgtaaattagttcaaccatcctggaagacagtgtggtgattcctcaaagatcgaaaaacagaattaccattcaacccagcaatcccatcatgcgtgcatgaacatacacatacgtgcatatgttcactgcagcactagtcacaatagcgaagacatggaatcaacctaaatgcccaccaatggtggactgaataaagaaaatgtggtacacatacaccacggaatactatgtagccataaaaaaagagatcatgtcctctgcagggacatggacagagcttgagcccactatctttagcaaactaacacaggaacagaaaactaaatgctgcatgttctcacaagtgggagctaaattatgagaacacatggacacatagagggaaacaacacacactggagcctatcagggatggagggtgggaggagggagaggatcaggaaaaataactaatgggtacgaggtttaatatctggatgatgaaataatctgtccaacaaactcccatgacacaagtttagctatataacaaacctacccctggactaaaattaagaaaaataataaattacagacatttttatctaaacacccactgcatgagaattcccaaatgaacaggagagtcttcatgagatggatgcactgtgaagaatttaaagaacctcctgctgttaagacaactatgttgatttaatattttaaaaccaattatgaaaaaagactaccttctccatccccaatgtctacttctgaacttcccattctatttcaaattaatattttagagccagaaacacactgattcaattgtttagctacaaatgtattataaactcaagctaagcaagtttcccccaacagtcttctttttcaaagttttccaggtatttgtgcacattaatatatcacttccatatgcagcttctttaatcctggtttataaagagatgaaagggtatccaaatgaagtctctaaacagtcactaccacccaacctcactgacaccatggagcctgccccccatacccaatccatgcctaggcataaaaccctttccagaacaatcatctaaacggagccttttccaaagttccgtgttaccgggtcacagtgagatggaatctatgtggagatggaattgagggaaagccctgggtgtgaatatacatattagtcaggacacttcagagtcagataaaattagcaagtccaaaatatggcatttcaggaaggagaggacaaaacagtgaaccaagaatataacttttacctgagaaagagccattccctcctcttctttctttcctcttcctctgagtttctttctcaggtaagtcagtctgtatgtcaaaaatatgttgtttaatgcttaaaatcaacacaccccctgcctctaccacacacacacaggaagaggcttgatatagaaaaaagatggtccttagcttccaattgcaacaagagtgaaaataaactcatgaaaaaaattaactcctaaacagagactaaggagttattccacctatgtcttcaaaaagttctcccttcttgctgaaacccacacattctgcatcaattgcattgtcctttgtccacctgacactcagccaagaaaaactgttgtgtccaagttcatggccagtatccaatgactgtcagtcaatgcaggatataaaagcctaaaattggaacaggtgaagagccaccatagctccacgaatccctgctgtagccatactaagtagtttagacttttgtcccacaggcagggggaaagcataaaaagatataacgccaggagatgacataataaaacttaagacttacttctgatgtagagatagggagaaagaataaaaagctgagagagaagcagctctcctatctctaaccctatgccccgacccctttcctagtagtttccatcatttttggaggtctcagagtcatttaagactaactgtaactgggcaccctctctcaaaaaattgccacatgcagacacatgctcaatcctgaaaatcatttcagggatcccatcggctcagattcagaatttctggtatacccatcatctccacgttacaggtgggcacactgagcctcagagagaggagatatttcaccaagttacctggaaaaggtctgagttgagtgagcagaactcagttgtaaatgaatgttgaaatggtggcctggatagggcagtagcaaaggtttgtccttatttccagatcaccattcacattcctgagtagaaacttctatttcatgggtttaattgatcccaaggatttaactcttttccagaaaaatattcaaaaatatgaaattacaaatagctattactcttggaaagcatgaaagggggtcagctgtggagattagtgctgagtaatctcttcattatgaacagacgggctctgttggaacaaaattccacaccaatccaggccattcttcaacatcttgcagagaaaggacaaaggggacctggaggaacatctacttagtgggaggcttttagatgacataagggagtaaagaaactgaatacagctgagccttgagcaacaccagtagtgatggggtgctaatcgcaccccacctccagtcaaaaatccaggtataacttttgatttcccaaaaacttaactactgataacccattgttgaccagaagtctactgaaaacataaacagttgattaacacatattttgtatgttacatgtattatatactgtattcttataaaaaagtaagctagagaaaagataatgtgattaagaaaatcataaagaagggaaaatatatttaccattcattaagaagaagtggatcatcacagttcatcttcctcgcatcctccccgaggtcatattgtgtgggctgcagtggaaaaggaagagaagaggttcattttgctgtgtcaggagtggcaggggtagaagaaaatcccctgtatagttgtacctgcttagctcaaactggtgttgttcaaggtcaactgtattaaactaactggttaaaccagattttaagtggtaaaagattatcaacaccttagagtgaaacactgtgaaatcaagtaccagacataaaagaatagttccaatatatgataaaaagtagaaagcatttaggccaggcgcggtggctcacgcctgtaatcccagtgctttgagaggcggagacagatcacctgaggtcaggagttcgagaccagcctggctaacaaggtgaaaatcccgtctctgctaaaaatacaaattcaccgggcatggtggcgcatgcctttaatcccagccactcgggaggctaaggcaggagaatcgcttgaaccctggaggcggaggttgcagtgagccgagatcaagccactgcactccagcctgggtgacagagtgagactccgtctcaaaaaaataaataaataaataaaagaaagcaaaagaaagcatttaaacctcataagctgaacaatacatttaagagaaaatactttgaaaattttttttaaatccaataaattatggaattacatttaagacaagttgaatacacgtcaaatttagaaaatgacacaagccacacacaaaaaaggagggaataatattgttaatgtctgtttgcaaaagcagcatacggtgtcacagtttcttcccatttcttgactctcctcaagatcagagaaagggaagagggtgagctggaattaactgagctaagtcagttaaccctctggctgaataagggttgcttctgatgtaataattagaaaacgcagaagcctcacaccgtagttttgcaattttcatgctcttctgcacaaacaatgaagcaaattttaaattaattatagagccatacatcagtacttcacaacttaatgttccatattaaatcaatccacactcacatggatttgggtgcccccccctttctccaccattatgtgatttttttccccctctctataaatgtttctcttccaccttctgtttctttccttttctttttcccatttcggcgttttcctgtccctttctgctcatttggcttcccttcctctccttctctgacagagtgtttggccccatcctggtagcatcctttttttcagtccctgctattgtttctgatggctctctaatttcgcgcatttctccctctttatcctccatttctgcttcccctctgttctccctggagaagggcgaagggtgtgtatccaccccgagtgagggctttaccagggggagggaagagggagtcagagaagagttttaagcagagaaacgacgcggtgggcggtcggtgtccacactgacctaaagcaaaaaggtcggggccagtacccacttcagaacgattttaatccgaaatggacgcagatctctagaccctctcggagcgacgggactgggaacgtcttagggccacgccgcgagaggaatgagcaggttcggggttttaacctacagggcgaccccaaaacccgacagcggagcgtgggaacctgtggcccgcgaggcgcaggcttgaacccgaaagacggagactcacccgagagcgccagtagccccgcgagatccgcttccgggtcggcaggaacctgcgcgtacgcgagtgcactggggcggcgcaaggggcaagggcaggggcagggcgcggacaactgtggggatgggcgggcaaatggcggggatgggcggggacaatggcgggatgggcggggacaatggcgggatgggcggggcctaggggtcggactgccggacctctcctcggcgcgtcccagcgacttttttaggcctgtttgtcgcccagcagtactcgattcttcacttttggattcccttgaatctctatggtgtcctttggagcctagctaagtaaaaaattagagacctgtgggccccttatattggaatcggagcttaagatgggaaaggtttgcttgaaaacgtttctgcgagcgatggaggcgcgtcctgcgacgaggcgggaggagcgctgggacctggtggatgggagagggcgacggtataaggaagctcttggatccaggaacttctgaaatccggacgattaaaatttgtatttaattaagcgaaagctggagttgtctgcgtaggtgatggaaactggaatgagatgcatttttgtgcctgtgcggagtgtacaattttatattgactttcactggaacgtaatttttatttccgctccccagtcacccaggaggcagagatgcaccatgggctgagttccagagaatttatggggtcagaccctgggcggtggggggtggaaggctgaggcttggctttaaaagaacgcaaagttctgcttgtatcgatctaaatttattttcctttattatcctaatgcacatttcttgagataaattacaaatccaagtgctggatttattggagttggtatgttgtgttttgtctaagttattaattactaatatactatcgttattattatttttattattattttgagatggagtctctgtttcccaggctggattgtaatggcgcgatctcggctcacggcaacctacgcctcctgggtcaagcgattttcctgcctcagcctcccgagtacctgggactacaggcgtgtgccaccatgcctggctaatttttgcatttttagtagagacggggtttcaccacgttagccaggttggtctgggacccctgagctcatgtgatccgcccacctgggcctcatgaagtgctggggttataggcgtgagccaccgctcctggcctttagtctgtaaagtctttattctcagttatttggaagagtatttttaacataatatgtgcttggcaattctcctggccaactgaattgatttctcttgggcccagagaggaaacttattgactggaggctccccaagagaagatgagcccatatgggggtatctgagtaaaccaaggtctatccactgtctctttgggtctctgttttcgtaactgggaattacatctgataacaggtgaagggtgaaaaaaaaatgagagtgcattttagcataaaaatacatatatgttatttacatataaacatacacatataaaaattctatttattttacatataaaaatacatatatgtatttaaattttttttttttgagacggagtctcacccgtacagacggggtttcaccgtattagctacgatgtctcgatcttttgaccttgtgacccacccatcttggcctcccaaagtgctgggattacaggtgtgagccacagcgcccagcctctttctcttttcaatgtattaaatgcacaagattccatactttcaaattccattttgcagaattattatattttcataggtttcccaaatcaaatattaattcaagtttcagttagttgttttaaaataataaatatatagttacataatctttaaaatgattcgttttctagcctaaaatgctttatcaccttttatgtttcatgtctcatattttagtgcacactctacctaatgttgtacattaatttccgtgatgggtgccgtagtatttttagtctttgcagacagtgaaatgagtgtttctgctggtatcttaacatctactcacattaaatacattgggtcatatgaaattatttagtgcctattataacttatcaagacctatgaatattcactcataagttatattgatatgtagaataaatactttgacaaaaataggaaattatcaaaccaaatttataaagtgaacatgacaaatatttatacatatgtaggtgtgcgtgtatgtatgtgtgtgtgtatatgtatatatatgtgtgtatagatatataaaggacacaactaggcaactattatagcgtagtagtgaacaccaatgttactgcaaccaggctactcacgttcaaatcttcactcttctggtatttaaatgagtcacctaatctccttgtgcttaaactcttttagagttggtgaaaggagaataatatgaattcctacctcatggagttgtgaatattaaatgtcagaataggtacagcatttataaaagtcactcatacattgtaggtgctgtaaaaagaaatacacgaaatgggaaatttgttaacaatatatctctctatatatttcacttttaatattcagggggaagaaatcgtcataagtgaaaggttattttccatgaaaatgtggcccacaactcgtgttgccatgcagaaccttctgcttactcaatattgagtgctggaaaatgacagaatggcctctgtggacctgaaaattggaatgatcttcctatttgtgggcagcaagccacccagctgccgaggcaagagaccgagggcacgagctgttccagcataataaaatatataaaacaacaagagttatattagatctagatcatagacatgattatatatgaatatcattaatcattagttggtagcaattactcttattccaatattataataatcctcgctctataatcataacctaggaaaagccaggccatacagagataggagctgaggagacatagtgaaaagtgaccagaagacaagagcgcgagccttctgttacgcccagacagggccaccagagggctccttggtctaggggtaacgccagcgtgtgggaagacgcccgttgccaagtggaccgtggtctagcggtagcgttagtgtcagggaaaaacacccgctatttagcagaccgggaaagggagtctccctttccctgggggagtttagagaagactctactcctccacctcttgtggagggcctgactcagtaccacctgcagttatccagaggcctgtctccctgtgatgctgtgcttcagtggtcacgctcctggtctgccttcatgttccatcttgtacacctggctctgccttctagatagcagtagtaaaattagtgaaagtactaaaagtctctgatatgcaaaaataatggcataagctgtctctctctctccctctctctctctctgccttggctgccaggcagggaagggccccctgtccagtggacacgtgacccacgtgaccttacctatcattggagatgactcacactctttaccctaccccttttgctttgtatccaataaatatcagcgcagcctggcatttggggccactaccagtctcctgctttgtatccaataaatatcagtgcagcctggcattcggggccactaccggtctccgcgtcttggtggtagtggtcccccagacacagctgtcttttctttcatctctttgtcttgtgtctttatttctacactctcttgtctctgcacacggagagaaacccaccaaacctgtggggctggaccctacactattccaggtagttgttggaatcctggggaatttttcactcttatattattatatgttcctttactttaggggatacaagccaagatccacagatttgattctcaggcacctgactgtagctgactccttggttatcctatctaaaagaatcccagagaccatggcaacttttgggttgaaacattttgacaattattttggatgcaaatttcttttgtatgcacacagggtaggcaggggtgtgtccattggaagcacctgcctcttgagtgtcttccaggtgatcaccatcaaccctaggaactccaggtgggcagagatgaaagtaaaagccccgacatacattggtctctccaatatcctgtgctgggccttccacatgctggtaaatgccatttttcctatttatacaactggcaaatggagcaacaacaacatcacaaagaaaggagatttgggatattgttctgccccacttagtgatgaagtcacaaagtcagtatatgcagcattgacatccttccatgatgttttgtgtctggggctcatgctctgggccagcagctccatcgttttggtcttgtacaggcacaaacagcaggtacaacacatctgtaggaacaatctctaccccaactcttctcctgggaacagagccatccaaagcatccttgcattggtgagcacctttgcattatgttacgccctttccttcatcacctacgtttatttagctctcttcgataattccagttggtggctagtgaacactgctgcactaatcattgcctgttttccaactattagcccttttgttctcatgtgccgtgaccccagcagatccaggctctgcagtatctgctgcagaagaaatagacgattctttcatgatttcaggaaaatgtgaattggctgtcttggtttatgttcggccactgatgcactcagacctcaagggatcttaagaatgattatcagccaatttcactgcagagagaggggtgaataagacagagacttatccaatgtgaaatactaaataataatagccatagtaaatgaaatcttatgtaattaacatgtgagtacttatatagttgtattttttattaatgattgcagtgaagaacttcagattccataaaatagtcctgaaataatgtatagatactgaaagcatctttaaatgtgtgatgtccaatctgagatattaaattttcctaagacgtactagagcttggaattgtataaatgggcatagcagttgcctaaatgggcatagcatgtgggtggttgttatggtttggatatttgacctcttgaaatctcattttgaaattgtgccttacatcccataaaaaaactgtggacatttgaaatatgataatgtttattgagaaagattagtatattaaaatatttccaggtaaacatttgaagaatgatccataagagacaaaaaggaatatagggagctgtgtcagctcacttttacaaagggtgcagatggggccaggcatggtggctcacacctgtaatcccagcactttgggaggctcaggtgggcggatcacctgaagtcaggagttcaagaccagcctggccaacatggcaaaaccctgtctgtactaaaatacaaaatttagcctggcatgatggcgggcacctgtaaacccagctattcgcaaggctaaggcaggagaatcacttgaacccaggaggtggaggttgcagtgagccaagatcgtaccactgcaccccagcctgggtgacagagtgagactgtctcaaaaacaaacaaagggtgcacataggagacaacaagtaaatagagatttggcaggtgggaaagaaattgaatggatttttgagatattcaaaaggtagattgttctgggtaagccttgatagagctggctatagtggcaagaagtaggtttcaggatggactttttcatttccaacttgagacaagtttttggaataaacttcctcagccttggagcagcagatgaatacaatttggagccaaaatacatgaatttgttttgtttaatgcagaactttttttttttttttttttttttttgagacagagtctccctgttacccaggctggagtgtagtggcacgatctcagctcgctgaggcaggcaacctttgcttcctgggttcaagtgattctcttgcctcagcctcccgaatagctgggattataggtgcgcaccaccatgcctggctaatttttgtatttttagtagagacagggtttcaccatgttggccaggctgctctcaaacccctgacctcaagtgatccgcccgccaaggcctcccaaagtgctgggattacaggtgtgagccactgtgtctggcctaatgcagagttttatattgattttgaagtcaccaagaaagcaaaatgaacaccttcaaaagaaataaaaaggataaggccgggcgcggtggctcacacctgtaatcccagcactttgggaggccaagcgggtggagcacaaggtcaggagattgagaccatcctggctaacacggtgaaacccactctctactaaaaatacaaaaaattagccaggcatggtggcaggcgcctgtagtcccagctagtggggaggctgagacaggagaatggcgtgaacccgggaggcggagcttgcagtgagtggagatcgcgccactgcactccagcctgggcaacacagcgagactccctctcaaaaaataataaaaaggatattaattcaaacataggaaatattttaatatgatcctctgtaaattataaacggttataattttttaaattaaacattttattgtagaataattgtagatctgaagaaaatttgcaagtataacacagagagttctgaaatatccgtcacccagtgtccctcatgtaaacatgttgccatgaaacatttgtcaagactaggaaatgaacgttggttcattcctcttaactgactttatttatatttcaccggttttaacacagtctttcttctctttcagggtccagtccaggacatcacattacgtttagtcatcttgcctccccagcccgttttgctctgtgtttttgtttttcatgatcttgacaactttgaagagcattgttttacttttagaatgtcgctaaaattgaatttgtctgttgtttatctcatggatagactagttttatgggttttggggaagaaaaccacacttgtcacatcatatactgtcagaagtctaaggaaatttggatgagttatctctggtgatgttaatcttgatcagttagttaagatagtgtttgtcaagtttcttcactatatggttactgtgttttcctttccacactctaatctttggaagggagtttctaagcccatcacacacacttaaagtgagtatgtgtgtttgtgtgaaaggggcattgaattaaccttcacctgctgggaggtatccacatagattatttgccatccttctgtaaggaagatatgtcttttctccttcatttatttgtttgttcaattatttattcatatcaacatgaactcattgatatttatattttgttatataattcaatgctaaggaattaattttgttacttaagtttttgcagctttggtcactggaagttgtggaataataaaaaatatatatctggtcttcatcctggttcctgttacagagcttcaaaatctttttttttttttttgaggtgaagttttgctctgttgcccaggctggagtgccgtggcgtgatctcggctcactgcaacctccaccttccgggttcaagcaattcccctgcctcagcctcccaagtagctgggattacaggtgcacagcaccacgcctggctaatttttgtatttttagtagagacggggttttgccatgttggccagcctggtcttaaactctggacctccggcgatccacctgccatggcctcccgaagtgctgggattacaggtgtgagccaccgcgactggcctagagcttcataatctttttgaatttcctgaatgatgaatgcctttgtcatattcacgagatgactcgtggcacgggtccctacatagctttacaatgaggactggtcaccagaaagaccaattatgtaattagaagaactttcagccaccagaccactggaaagggaagaggctagagattgagttcaagctcatggccgttgaattaatcaaccatgcctaggtaattaaactctgataaaaaattcagacatgaaagcttgggggagctttctggcatgggacaaaccacataatagaaaataaaattgcaaagtaaactaataaagtcttcaaaaaagaggttatcactcaaagtcttctcttctagctatcttgaaatatacatgacattgtgatttgctatagtcatctcactgtgtagtagaaactattcttcttggctaattaactttgtaccaattgatgaacatctcccagcagcagtcccccaccccttccctcctgggcctctggtaaccactattctaccctctacttctatgaaatcaacttttttagatttcacatgagtgagatcatgcagtatttgtctttctatgtctggcttatttcagtaacataatgtcctccaagttcatgcatgttgccacaaatgacaggattttattttgttttatggctgaatagtatttcattgtgtatatataccacatttctttatttgttcatctttgtatgagcatttaggttgatttcatatctggactattgtgaatagtgctgcaataaacatgggactgtagatatctctttgacatactgatttcatttcctttgcacgtatatccagtaagaagattgctggattacatggtagttctatttttaattttttgaagaatctccaaactgctttccataatggcttcactaatttgcattcctaacactacaaagaaatgataaatgtttaaagcaattaacatggtaattaccagcatatgattattatacaatgtatacatgtattgaaacatcacataataccccataaatatgtactattattatgtgtcaattacaaattaaaaattagtgaaaaaaggggttaccaaatgtctaataaacaaagaaaatatgctcaattgccttagtattcagggaaataaacataaaaccgctaactagtactcaaatacactaaccagaaggctaaaatgaaaatgacagaatataccaagggttgaccatgacgtgaataaactaatgatctcacactgctgagggttgtgaaaattggtgtaaacctgttggaaaactatttgtcagtgtctgaaacagcttaacagacacaaaattatgttaagtagaacttaacaattctactactgtatatatacatatctctctcaaataaactcatacgtgtgtcaccaaaccacaagagagatatatatatatatatatctcaaataaattcatacatgtgtcaccaaaacacaagttctagaatgtatataccagcattattcataatagccccaaactgaaaactactcacatgtacatcgagaatggaatgattaagttaatagatatttacacaatggaattctatgcagcaatgctagtgaatgatccacaaccacctgcaaaaatacagacatattcacaaacaacatatacaatacaagatgccagatacagaataggttattttgtatgattccacttacaggaagtgcaaaacacatcaaagtgatcgatgctatgagatgtctgaatagtgctgaatccttgggagtcatgacaggaaggagtgcatggggacaccttgggttccaggaatagcctgttttttcatctagaagatgcataggagatgcgttcaggttttaaaatttcatagagctgtgcacatttacacagctgggagatggtacataggttacaatttagagaactgggagatggtaaataggttagggttttaatgtgccaatattgccaaggtgaaagttaaaggtcttacataactttatgattattttatagaagtaatttcaaaatgtaaaacgaagatagtgagtacaaaaccttctaaacaaaagtgcaaaatgtagaattgctttaaaaatgttttaaaaacacagaagttaaaatagaaagaataagaaaatagggaaagtgtaaagaacacagaataaattggtaaacataatcctgaatatatccattattacattaaactgaaacagacaaataatttttgttatagtaacattgtttgactataattaattgaatattttagacagatacataaaacattacgaaaaatatacaataacgaaaaatacattctatgtaattttaaccaattaaacaactagcatggctatgtaaataacacatgaaatagacttcatagttggtttaacttgtcactattataattaatatttttctacatttcttaatgtaaacatttctaatattccttggtagatagcaaacataatgccacttactataaacatacacacaggtatgttccatcttgctttgtgatctaatgtgcagtacataatcctaagtgcctcatacaagttaaaaatgtttccttattttcgttcatgaagttcaatacgttaagtcaaacgaattcttttgttcgatgaactattgaatctttaatactttgcatcagcttcataatgaaaataaagactcagtatgttagattgtttcttataattggggcataagcattttgctcctttggaagtctacctgtcataatctccacacgaacacagtggattcatactttctccctcaatatagccatttctctgctatttcaagtaaatttgaaggaaatgaatgtctgtgctcacttgctcaccttagaggtaggaaaacgcaacccccaaatctctttctttccaacatggccaactggcatcttcacatgataaagaaaaagagtctaccatctactcgtctagatcctcaaatctatgcagtctcacagagtgtgtgtggttttctgttgttgttattgttgttgtttgtttgtttgctttgaggccgggtctcactcccttagcccaggctggagtgcagtggcgcgatctcggctcactgcaagctctacttcctgggcttcaagtgattcttccatctcagcctcccaagtacctgggtctacaggcatgtgctaccatgcctaggtaatttttttcatatttttagtagagatgaggttccgacacgttgcccaggatggtctcgaactgctgggctcaagccatcctcccgccttggcctcccagaatgctgggactacaggcatgagccagcacgcccagtcagcatctgctttttaatagtcagcattcacaggatgtttttaattttggcataaatatatttttttgtctcattcttgatcagtgtaaccatttctacatgaaaatgatttaaatatactgatttccctccatatagttatattttaaattactattatctgtctgaggatgtaacgtacagattttataacttgggacccaaatctggaattaaccaaaacctcgcctccaagcaacctcattacttcaggagaacatttttttcttcactttcctgaatggtcatatcacacactgctacttgtcatgtaactttttcaacaatctcacgcttacttaatttctgcatagatttattatatcagatcgaaggttgcacactcaaagagatccccatcattgccagattgattcaggacctaatttttttaattgcgtagacctttaatgactctactgcaggccttaataaaactttgataatatgaatatttacataataattgcatcatatttcatttacaattgttcttactagttattgtttatcattggggtggaagttcaccctgtcttgttcatcaccttctcataattgggagaggttcataattaagattacattgcggcacagaagagtaagtcatcaattgaaccatgagcaaatatatacaatgtacatgtttatgatgaggttaggagatcttgtcatcttttccaggcaaaacaaaacctgtatacactggggtcacagctcatgagaacaaaggggctgagagttgggaaacatacactcattaaggctgaagtgttcaccagtaaactattgggattatccaaaagagccatacaaacttggaaaaggcaggagagagtgtaagaagacacaaaggtgctcaccaggatgaggatgctctgcgtagctctgttctctggggaggctctgggggagagattgctcctatcaatgtgctggacccgctgcttgtgcctgtgcagtatgcaaaccatggagctgctgacccagagcatgagccccagacacaacacatcagggaatgataacaacattgcacgcagtgtctgtgcgattttgttgttgcctcccccagaacagtatcccaaatcctcgttcactgtgatgtttgtgtagttccatttgccagtcacatacatgggaaagatgatgtttaccaacatgcacacgatccagcacaggagaacagaaaagccaacatgcttgggggctttctctttaagttttgcccacctggatttcctggagctgaccgtgatcacctggaagacactcaagaggcaggtggtgccaatggacactcccctgcccactctatggagatagaaaacaagtttgcacccaagagcattgagaaaatatctaaccccaaaagctgccattgtctgggggactcctttacagcggagagctaagaagttggctacaatcaggtgcttaacaatcaaatctgtggaccttaacctgcacccagtgcagtaaaaggagagataatggagaagaacagagaagctccccaggactcccaccacggtctgtgataagatcattcccactgccacataccgggaggccattctgccactgatgtctgtcactgatgtttgtcttcagggctgggaggtcctgcatggaaataggaggcatgagctacgtttatagtgtcacctgcaacccagcattctccacctcccattgctctgcccttagaaatacttaaagtcactcttctcttaagaggcttttgagagttgaatgcgtaacctttaaagagcacttcccatgtgggaatcactgctgtgcagatcatacgtgcggcaacttctttattcacaaacctatgaggcaggcattactattactttcattgtaaatatgagaaggacatacacacagagaggtgaagtggctggcaacatttccaccctacttacaggcaaaatgcgaacttgaacctgcctggttttattgcaaagacagtgcatttagccgttatagttgactaacaaagctagatagctgtgttctttgaataagacacacacacacacacacacacacacacacacacacacacacatacacacacacacccctttgtttttattccttgtcattatatttcagtcttgtagtaggttactgtatgttgtaatgattttacattatgtgtaaaaatgtattctatttgtcaatatccaaataaataaaggtttagagatcttaaaaaatgtagatgcagggattacagtttgatactatagaaacctgcaccatgacaagttggatttaatgactgcaagcatggatcaatattagaatggaaagagagtaaaaaacattgtgagcatttgcttttgtgccacggacaaaggcataaaggcacctaccacaatcatgtcttacccaaaacaataggacatgaaacaacaatatgggataaaatagtgtaaggtaataaccaaattcttacaaatgttagatgacatatctagatctattaataactgagttaaataaattattatccttaggacaatatttgcataactaaattaaaatgtgacaaacgtgaaaattggaaactctagtgggtgtatattatatatactttgtaaacggaaattagagagtttgggtgatgttagaatctatctgaagcagagaacacatcagaggacacatttgagtctgatagctgctctctttagctcattattataaagttaccttttccttaaatgctgcctccttaacatcaagaggaaagacagtctcaccataatcaacagactatggcagttttcagtagagacacaattaatgctcccattaagccctgcacactctcagaattagagaaaacattttcgttccagcaactactaattagatacactgtttgtgtaaggaattacatgactcctgtagagtcaatctattcattacaagtatggtgatattatagtcatttcctcagcaatcctgaaattttagtgtataattcctgttgggtaggcggaacagcagattgattttagtaccacagtccttaagaatgcaaccagctttcattattacgacagattgatttaagaatgttagtccttaagaacatagtcaggtttcactgttatttggtgaaaaaccaacagtgcgggtcagtgtggattctcctaaatcacatcaggaccgcccaaggattggtgtggggctaggaccccatttctctttagtagctcagctcatggctcacaaccattcctcttttcttggtgacttgggggttagactagttttcttttttttttttttttattgatcattcttgggtgtttctcgcagagggggatttggcagggtcataggacaatggtggagggaaggtcagcagataaacaagtgaacaaaggtctctggttttcctaggcagaggaccctgcggccttccgcagtgtttgtgtccctgggtacttgagattagggagtggtgatgactcttaaggagcatgctgccttcaagcatctgtttaacaaagcacaccttgcaccgcccttaatccatttaaccctgagtggacacagcacatgtttcagagagcacagggttgggggtaaggtcacagatcaacaggatcccaaggcagaagaatttttcttagtacagaacaaaatgaaaagtctcccatgtctacctctttctacacagacacggcaaccatccgatttctcaatcttttcccccacgcttcccccctttctattccacaaaaccgccattgtcatcctggcccgttctcaatgagctgttgggcacacctcccagacggggtggtggccgggcagaggggctcctcacttcccagtaggggcggccgggcagaggcgcccctcaccttctggacggggtggctgccgggcggaggggctcctctcttctcagacggggcggccgggcagaggcgctcctcacttcccagatggggcggcggggcagagacgctccccacatcccagacgatgggcggccgggcagagacgctcctcacttcctagatgtgatggcggccgggaagacacgctcctcacttcccagactgggcagccaggcagaggggctcctcacatcccagacgatgggcggccaggcagagacgctcctcacttcccagacggggtggcggccgggcagaggctgcaatctcggctctttgggaggccaaggcaggcggctgggaggtggaggttgtagcgagccgagatcacgccactgcactccagcctgggcaccattgagcactgagtgaacgcgactccgtctgcaatcccggcacctcgggaggccgaggctggcggatcactcgcggctaggagctggagaccagcctggccatcacagcgaaaccccgtctccaccaaaaaaatatgaaaaccagtcaggcgtggcggcgcgcacctgcaattgcaggcactcggcaggctgaggcaggagaatcaggcagggaggttgcagtgagccgagatggcagcagtacagtccagcttcggctcggcatcagagggagaccgtggaaagagagggagagggagaccgtggggagagggagaccatggggagagggagagggagagggagagggagagggagagggagagggagagggagagggagagggagagggactagttttcaatctagaacaatttcttattataataggataacttaccctggctcctgggaggcacccttccctacagactgaaacagaaactttctccccagctccatcttgctgctaggacggtgggctcagtgcgaaggttgccacagccaggatcatgtgggagggaagcagccagaccctgagatatgggtttgtggttctgtgacctcacctcccctcagaactgcaattatcttttcacctgcagtggcaacgacagtgcagccttggggagctgagaacgtttcagaacaacttttcttcccaattgctaatcaccaaaagcaatgacaagtttctggccagcatctcttcagagactatgaggagtgtttgggagaggctctttcgtctccattccctggagagacacagtcttacatggagggagcaggaaacgctgagttctgacctgtggcacactcacagtgagggacgagtgtccccggatactctgctttgctgggaggttctgccccaaagcgagctctttcctaatcttcatgccactcagctgcagcatcattagattatgtgcagagaagtgaacccagacagagtgcctgagaaggattttcaaagggatacaagtaaaaggacaaacaggatgccaacggctcaatgccaattaatttggaatctagatgatgtggatcaggtggctaaaaagtcacgctttgatcaatcctgggaagcaaatactgcttactagattcaagagcattggatggttgccacagtcctctacatttgtatgtgtgtgtgtgtttctgaatgttcagtaatgatcactgattgctcttgtaataaattaagaaatataaaatgtgaattcaagttaatcttttgggttttcctacaaacaaatgttattcaggccctccattcaatgcatctcagtttccatgtcagggattagagccataaggtgaacaacccctaccgtacacaaagacgtatattcacacatagatgtacacacacaggtgcaaacacatgcatacgtgcacagcagcacaaatcaaaggaacatcacatacatatacacagctagacactcgccctcacatacatattccaccacaggctcacacccacccacacacctatcacaaacccacactcatattcaaatacactcactatgcccagcactcacacagactcacacagtcccactgacctttaaacaccacactcgcagagtcagcacacgcatttgtatcttgataccaggttcctatctggagaatagcggcggtcatgcctctattgtgattcagcctttatacttcttctcactttgcaccactcatgatgatgacgtcaccatgtgcaatgtataaaatgatgtgcacgttgctaatttggtccaaggcattaagtagaaaagttggagtactggggtcgatattgcatgggtgtgtgacagagggtctgatattgcgtgggtgtgtgacagagtgtgacattgcacaggtttgtgacatagggtaaatctgggggctcatggaaaggacgctattgaggcagagcacctgtaaatgtagattgacggtgaacaggagacagagcacagaggcttaaaagggacaaggaggttaatttccagacagtggaagatgccgtaggttttaagggtgcacaggggaaaagcgtgcaaggagctaagcatatgggggatactaggtgctgtgaggacaaggggtgccagagtcatggaatgaaaggagacgatggggaggtagagataatgagggaaagtgggtaaacagcaggacagggttcaagacaccggcgacttgatgtcaatggaaggttaaagaaaatgaggggaagggaagtaacaggtggggtgcacaggtcctgggagtggtcagtgacccaaagtggagacggggatgggaatggtggaaggaactacgtatatgtcgtaggcctgggaggaaaatgagagcagggtgatgagaggaactggaagggtcatgggaatgagcagccaatgggtttgggggaagagggcagggactagagagttctgggagaagggttggagggctggggaagctgaggacatcgggaggttgattgctgggacatttgaaggagaagggcatggagattatggaatatgggctgagatcattggaatgtggattgatttagggcttaggagaaggaggacatggaaggtggagagtgtgggggcagtgggaggtggggagggcttgcctgacttccccacaatggatgatacagaggtgctggaggcatggaggccaagaagggcatgagatagcggtggggtccaacgtagaagtctaaagctgtcaggaggatgggggagtggattgatgtggaggcccgggtggtgactaagggtcataatggtggtgagagggaggccacaggggagatgaaggaggagggaggaactacatggaggttggggtcgtggaaggcactggggaagattggaggtcactaattcattctccattcatcatctctctcatttacagtggactcacaactgagtcatggatagactctagttccagttcgtgaagagcaaattatgattctgtaaaacacccccaagaatgcttaaaagttaacatgcagtagagggccacagggagcatctgggatgtgcaacatgccacagcattttctcttctccttcaggacaccaggtacagaatgtgactgcagtgggtccggcaggagaggctgtttcctggcacctggtgctcagtgatagaaggaggtgtcagaaggccccttcctgcttctgtggatgtcttgagtttattttgtgtcccaaattcaaaagtatgagcttcttttatttattgtggtatttccaaaatatggcacatgcatattaatagcatatagtaatatgccattaaaatatagcatattaagaaaataaaatacagaattcaacatttgagcactctttccttttgcttttctgtcactggaaaccatcacaagaggtgaagagtggtaatcattttgttgatacattgagaatattttttcaataatattttatcatcaaaaaatgcattggctggttctccaacccctggtgttatcgtgtggttatgttaagttccacgtaggcaaaagagactttgtggtataattaacaatcagctgaaatgaacccgggagattatcctggatgatctaggcgagtctaatgtaatcagctgagctcttaaagcagacaaagaagttagagacaccgccaaagaggaagtcatggcttggagggaagagggggatttcacaggctgttgctggctctgaagacgataggcaggtggaaatcatgagaagaaaaggggatttgtcagccacctaaatgatcgtagaagcagagattctcccctgtggaagcagattctctcccaagcttgcagagaaaagcccaggcagctgaccccgggattcagaccttgtgagaccctgagcggaggacacagccaagcactgtgggcttctgacctacggggaaaaaataaatgggtgctgttgtaaggcgctgaatttgtgtaatggtggagtcatgggaaactgataagtacaggatccaatttaatgacaaaatgtttaaacagttaaataaaatgagctataaataccgcagcaaagatacaaggctgatcccaggcataacaattgttaccagtttgagatgtatcctcctttatatattgatagctctataaatacatctctctctatatatagagagagagatacatgtatgaagatcttatatatagacagatatagatctatatcttcatatctatatctaaatgtagagttacagagacatagatctatagagatagacatagatacaaatatagataaatatgtagacacacatatatgtttgcatagatggacatatacatagataggtctatttgtatatatacatacacatatacattataaggcattttgtcttccttcaaaattcatataaatatatgttcatgttggagtcactgttcgtgttgcttcacccagtcagtgatgagtgtggaagatgtttctatacctccttctcggaaacaccgcatcctatttcctggcacgtatgcatgaagcatgtcactgaatcgctcctgtttacccctgtacagagtcgcatgtgcttgtctgtctcctgctgtgaaatgctgcagggagtgtaggtggctgaaaaaacaatacttttatcctgtaattgataatgctgaacgtgagattttatttttgcatggggtcagacagtctgtagtatatgattgtgggaggaagaagtgggtaaagaaatcaataatattttatcattgaaaagaatgcgtgaatatgcactattactgtttgtcaatttaaaaataaattaattaaatataaacagtaggcaccccaaaactttttgaatctattacacatatgcaataaaaagaatgcagtatgattagaaacatcgttttctaagaaaaaaactattttttccatcatcgaaagtactcaacctaagattttatttttgcgtggggtcgaaaggtacatagtacatgcttgagggtggaagaattgggtacagaagtcagctacaggtagttttttgttttaaaagggtatgcgactttttaaaacataaacttaattgacaaataacaactgtacatatttacggagtacattgtgatgctttgatatatgtatatgttgtggaatgatgaagtcaatcagttttatacccattattgacatagctatcacttttttggcaagaacatttgaaattcactctcttagtaattgtgtatatttacagtatgcattattatgaactacagtcatcatccggtgccatagatcttaaaaaattattcctcctttctcactgtgcatgaatttttaagataaatgcagtggaggtcaaaggattaatgcaagcaaagatgtttcagggaagaagttttagcagttctgcttcataaaaatggtaatttaacctgtttcagttttctggacaatatgagcatttggattttttgaaagcaagtgaatttcttattgatggcaaaacaaaacaaaaccatgatgttttcagagagagaacacagcaattgacccaggacaggacatttacctgagaacatgcctttcctatctcctaatccttctcttgctcttccttattcccagagcttcttcctcagatgagattatcttgggaaatcccacgtgaattttgaaaatatgcctttttaacttcgttttctcttccccacaccaccactgcacccacgggcagaaggaacttgaaatggagaaagggcaacctctgcctctgtcctttgtcacaggagaggttcaggaagcctgtgggtgacaaacccacctgaataggccagacagaccccacaccctgatatctctgtgagaattcttgggaacactcctttatcaggtccttccttgcattgctgtaaagaaatacatgaggctcggtcatattaaagaaaagagaatgaacatgctcatggttctgcaggctgtacgggaaatattgcagcatctttctctagggaggcctcaggaagcttttactcatggtggaaggcaaagagggattaggcatttcacatggcaaaagcagggacaagagagtgtggaggcaggtgctggacactgttaaatgaccagatctcatgagaactcacttactctggaaaggacacaaccacaggggaggaggctaaaccattcatgagaaaaccgcccccacaatccaatcatctcccaccaggccccaggtcaaacactggggatgacatttcaataggagatttgggcggggacacacatccaaactatatcaactcccatctcgtctctgcagagaggcaagtcttcactccagccctaattcccaaatgctgcccagacctcaggatctttaaatcctggtgagttgctgagctcctgtccacaccctggagctgtgcctgccttcctgttcccatcagagccactgactctttccaggagctgtccctggaactgagagttggcttcttgcagttctccccatctgacatgggcttttaaaaattccatggatacatggagagtttgggtgacccatcccccatagccacactgcatactctagtccattcctggactcacagtgagccagactgttcttagacctcactcatccttggtcccacaagggccagaatctccagtcctggtttccactgagctccctgccatgggagactgagctgctcatcccctttcgagatacagaatgaaacagcctgggcttatgtatgaacattttaaacatgcagaaaatagtgtatgttgttcaaaatatatagttctaggttaagttaaacaaattatgggacgggcaaacagcaaattatattatttgtttcagatgtacacatgtgtgataaaatgaaagtgctagcaacagaataactaagaaatggagaaagagggagaggtgattagatcagatgtgattgcatcatgattaggttagccagggggagtgactgtggggctctggggcagtataaatgccagcaggagaatggatcttcccctcagtgttctttgctgtcttcatcgcagaagccccactgtgaggagtagagtctgcagagggtccacttacctgagcgactgctagagggaaggaagacaacaggttggtacattacaattttgggacttggtttattcccacaggagaaatagaagagtgagaaaactctgtagtgggtggttttagatgtcgaggtaaagattacttaattgcttaatagtgtttcttaagacagagcctgactcaaaaaacgtttcagaaattgtaatgatcgaaaaaatatatattaagaaaaacaaaaagaagaaaaacaaaaaacaaaacgaaaaaaattaaaaacaaaattttaatgatcatataaagatcaacgtttgcaaggaatgctcacccagcaccctgaattgtgtgggtgctggatgagcagttatggagacctggtgcctttgacggagggcttttaaataagagatttcttcacttatcttttgtatcggtatactcattgacgtttgctaggagctggtaaaaattcagggccctgagcctctatacctagattaagccaagcaagacttaggctgtgagcacccaatctataatggtggtataaagaatggttctacttaaatacgtagttaaaaatgtttctttacctctcaattttggcgatttggattttgaagaggaaagcacactttattctagattttcgaatgtgtttgtccccaatgtagcattccctgatctttttttttttttattttcatggcggtattgtcttctctttttcctaatatgatctatgcagataaattttattatctttctatgggcacccatggtaatgtatcctactactgctttcaaataaagaacacgttttcctgttgtattctatttattttttcatctgctccaacttattgtttgatttgccatttccatcttttcatttttgcaatctcatgtttttctgtctctaagctgtctccatggacctgagcacttcccctaaattttatcttttttcaatcatgttgtggcaaaaaaaagatgcccgactgagaccccaggagagggttctttgttctcacacaggaaggaattccaggcgagttgcagagaacagtgagaagagagagtttactgaaagctactgcattacacagtagggcgacctcagaatgtgaccggaaaatgcaccgtctttttttttccttttaagttgttctgatatagagtcttttccatgtgaagatttaactaagctgtgtctacatgcggtgggctgatagcatgacaatgtttagtatcctgttgatttaaagaaaactctccttgacattccagtgtgtagcttaggaaagcatagctatcattatgttgaaggcatctattgctttggatattgggcatctggacattttgctttcataggagtctgtcttgcaagcattgctaagctgcttcctcagccacagacatcttagaaccagggtggtgactggccaggactgtgccttgctagtttcaagaaggagttgatttctaaatggtgttgccctcactctcctatgttcctgtttccctagcactgtggtcatttagacaaagacatttcccctgaacccaggttttgctttgctcatcagtttggacatgaaagggctttacctgtattttctttgcactttctgatttccacttgaatatcttgtttgaacttaaggactttgattgcagaaatttcagagactgtgcttcatagtttaaaacattcttacaatttataaaatgtaggtatatctaattttgacaaacagggactacagattgataagatatccagttttctaatatattaaattttctttgaggccaattccacgatcaatttttccagatgtttgatggtatactatgagggtctctagaggagggacctgcattgcatacatatcaaacacgctaagtccagtgaacaattcttttaatggatcacctgcttttctcattcacattggtgtcatgtcactggcagaggaaggatgcgtccgtgtagtttgaatgacaggatgtgtgagtttactcctagggacacggtgggcacagcagagagatggggctgactgcatcctgtgcctgggagagtccagggataggaaggaatcagcgtctcattttctaccctccacagggaaagagaatccctcgggcaggaccagcagtgatggaccccaacactctctccatggaacaggggaagcagttcttaaagcagtgcgggatcccacaaagagatgtgagtacaggagctgcggggtcacctgggaggcaggtggaatgggtggagtccaagtcgagggggaaggctgaagcaggctccccgtccatgaccggctcatattcagagtttcacaccctccatacacgggcactgacccattaaaatcgatatgtaattcctcaaagggacatgggaaaatgacaccaccactgccccttagttcccacctgggaacagcagcacttcccaataccctgggctttcactcttggcgccatttgaaggtcatcagccaactcctcaccagctctggagtaaagaactgtgagattgcctttgcatcctcatagcttagctcccacacatgagtgagaacataaggtgtttggttttgcattcgtgacttattcacagagaataatagtctccaatcccatccaggttgctgtgaaggccattaatttcttcctttttatggctgagtagtattccatcgtgtgtgtgtatatatataacagttcctttatccaccggttgattgatgggcatttgggctggttccatatttttgcaattgcgaattgtgctgctgtaaacacgcgtgtacaagtatctttttcacataatgacttctttaaaaaaaagaaaagaaaaaaaaaaccaaaacaccaaaatgtgagcctgcccagcattccctttaaaatctcaggaagatgggagttcctcctctcctctgccaaggcttcctcctgcctgcagaactcaggttgcgtctccattctcctttctctgcattagattgacttgatgacagagaaatgggttgttctcgcctctgtggaggttcttctgcgatttcctctgaagccaggagaggatccgaccgcccgctatgtctcaaataaaaaatgccaaccttcagtggactggcccaccacaatttcacagagacgtggataccaagagaagtggtaagacaagtattagggaataagctagggacagcctgggggactccccaagcactgttttcctgttgtattcctgttgtgggctcaaggtttctgctgaacacgcctggaggcttccgtcttgcgtgtccccccatgacacggccagtgatgtgtgcgaagcctggcgtgaacacgcacatatgtgtcagcatcgcaggatcctcagagggctggtcctcgcttggctttgtgcctgcctctgtgtgaagagtggcgtgtggtcacaggggtctcacgtgaaacgtcacgagtgtccataggttgaatatgaaaactttgcaaagctttgagcttctggttggttttctgagtgagaagctattctatgaaaatagtgggttttctggaactagctggaaaaatatcaatagttgttggctgttcatctcttggctttgacaagtattgtcagagggtttcagctctgaggcactgactgcacacaaaccgagagcccagaaaacttttatgcaaggctgcaaatctcacttcgccctctagaaatcaagcagcctttggtttataaaatctgtgtcctgttctgggagtaggtcaggctgggagagagtcacaaaatagcacaactgggacctgggttcagagaggaccaagttacagtgggcgtgactcagtggccagtgcatccctccatccctacttgggtaaataggggtaggagggacttccgtctggtgtctgtgtaatgttttctctttttcttatgactaggaaatccaaccatcatttaatgaagaagaatgatcggaagttcaaggacctgccacagatggcccgtcattccgtccatcatcaggctcagaggccccccagagccaaaaacccacaggagcagcagaggagacccatggggcagacgactctcccagcagagcaggaggaatccagggtcagtgggggcttgaaaatgttggtaacctatggacaccagagagtgggcttgaacatgggactcgtgattatgacttaagagttcccactggtctcagtctgaccacatcggtcagcctcctgtcttggcagattggcccattcggagtctctgaggagcagcctcattctctgtccagtgtcatgtccagcctggtgtttgccgagtcctcaacaccggttcattatcttcactctcagacacaagcgtccttcctcctgggatccctgttaaacgggctctggggaggacgataatatcttgaatttcctggcaaccaacagcccatgggcgtatgtccccctcctaaaataatccatctccaaaacccaggccttgtgtgaaccttgcaggtgcctgtgattgctgttgactcactgctctgtgtcctcctccacctgcaggtgaaatgcaagaactgcggggcctttgggcactcagccaggagcaagacctgccccattaagaggtggagtggggcccttcctctgcaggccctgggctcacacaaggagaaggagaacctgaaaccagcaaaggcccagctaccctttacgactccagggccctttacgacgaatgacagagaaaaggagcgaagtccaaggtaaggattttgcagggtcaaggaagatccgtgaggtcggcgcctcaggagctggtgtctcccctagtctttctgtgcagccttctctaagcacacaaggaaagctccaaatggaggtggatggaggcccctgccttccagggtccgcactccgagcttattccagcgctgagagtctctagagggcaggggctgtgggagacctggggatgttacccgaggcaggcagagcagttccagggcctgaatgaacttagagaacctggggccatggtgggggtggggggcggagcttcctggaagtggggctgcttctgagatgagagaaggggctgtcttggcaaagttcacagaggcctgaacgcctccctcacccaaagcaagggctagggctgggttccgggagggtgcttggttcccagtcactggtgtgagttggaggatcaggcgggtccagacagtgaacgtgatttcttctgcagtccccagcagcagcagagcgaagctccgacgcagacatttcccagaactccccaagagaaaatgcaggaagcctggaaggagccagcagaagattgtttgttcctgagggtgcgtattcccccggcccctgctctgtttctcctctaggtcccctgattccttcactctgtgcccctcatggatgggggtcatgttaagacctaggctgccctgcaggagaactgcgctacccgaggacttcccatactccagtttccagcttctttttcttcttctctttttttttttgagacggagtctcgctctgtcacccaggctggagtgcagtggtgcgatctcggctcactgcaagctccgcctcccgggttcatgccattctcctgcctcagcctcctgagtagctgggactacaggtgcccgccaccacgctcggctaattttttgtatttttggtagagacggggtttcaccgtgttagccaggatggtctcgatctcctgacctcgtgatccacctgcctcggccttccaaagtgctgggattacaggcgtgagccaccgcgcccggcctcaggttctttatttgaaagttggtttctgtacctttatttgcaagttggccagcaaatgctgctgggcgcatttcagtgcccgtggggagtgactgatcagatgccttcgggatactggctgcagataaggcgtctccttcatttttgtacatgatcttacatctgctttcaaaaggagctgtgccatttccagtctccacattgtgtggggaattgatattcccttgatattaacaatagagaacataaagagttttaattttcatatgtgatagtcgcagcaaacagaatggttggctatctttccccaacactattcctgaagtgacaattctgcatatattcagtgaccatgtgtacatccttttctgtgacgtttaatttcctacgtcctgtctcttttggagggtcttccctatatttgatcctgatttagacgcagtcccagtgcctgttattctctgtttctcatgtcagcctgtccattttcctctgtcctagcttgcttctcatcttcacacagtgtctgttgtgatgtggttttgcatgtgagttccctgcttcagagtttggaaattctactgctgagctgtctcatgtgggatgttttctcccgtagcatcctaccatgccactgcctgtccacaccaccaagaagagatctgtcctgggccctgtgtccacaggtccaccgcctgtcaacaaacccgagatgagattactctgcccttcgggtcacaacgattcacctcaactgagcacctgtggacccaccaaaggacatggcagggacgttactgcctccctgctccctgttctgaagagctcccaccagacccccactctcagtgccaggctgccagccaacaggcctgacatgtcctcccatggtgctctccagcctgccatgcaggcgcttgccctgggtcctggccttaaatcccaggcagaaatcaaacatcccgacgcagatgcaaagcccagaccacagcaagtcagaaaacagtgtggccaggactccagaacccaggcaccagacaaggagcctgcccccgtccccacccagactttccagaaccccgcaaagaaagcaagattcagctccttccagacccctgcactgagaactcagctcccggatgtgggcgctgtgcagacactccagcctccccgcactgcaactggacttggatccaaagaggcacccaaggcgaccgcagagacagcagccaccaagacagcaaccctgcagcccagagtcaacctccagcccgcacccagctcacctttcctgggcccagcccagggctgccccgtcctccagcctggaccacccattcatgttccagggaggcccggcagtgtcaccttcatgagaggggacaagggacagaagagccccaggttcagaatgcctcccacatcccgtcctcctgaaaactctgcttctgctcagagccctcgcttctcaaggcagcctgaggggcagggtccccaggtctcaacgagtgtcctctatgaggaccttctggtcacttcctcctctgaggacagtgacagtgactgaggcccccaaggcaagaagacccagcttcaagcccatgcgacttggaagtggctgaaaggctgagaaggggagaggcaggaagcagccctgtacggggtcagcccttccctggcagcggtgtctgttcaaacgtggaccccagatactatcggggatcaacgaacctgcctatttacattgtataaatttaacctgtattaaaatggggctgttgaaagtatcctatagatttctttttcaattacatataattatatgagaaactgagtcaacataagcaaacaatgctccactagtgtcaatagaaagctctgaaactcatctgagggagggagcaaaccactgaaatttgagtaattctgggcaaagggcccttcaatggtagtggaaaacgtcagtgtctcctgagtcaagaatatttgactgtgaaggagagttgtagtgagaaacgattagccttggaaaatgggaaatatttttttgccttgcaagaatttttttaaaaatcagtgaattcaaatatttaagaaactgtttttcataccctatagttttttttatcagtccattcaaatatgtaataaactgttcttcataccctctacatttttccaggatataaaacaagggaaatactccatttattttatgaagctacctagactctgatttccactgtggtagagagggcatctcagctagcgcatgtgtaaagttgaggtaccaatattctcaatgttggagttattcagtggattcaataagttatgcaaagcacgtcatgaatggcacatggtaaaatatattttactattattattatcataccacaagtaaacaatagagtaacttgaagtttttaaacgaatttcacttataaggatgtattctactagccttggaacttttgttattaaatgtcattgtaaaattctgtttggttaatttctttccatatgaataaaattctctgaactatgacacgtcttactggtgttttgagttttccttttcacctcaggccaatttctttacatttcaatcatcgtgtttcatttacttgagcaaagaggactgggtgcccagagtgtcacccgcagacccatagcttctgagaaacacagaccctcaggcacagccccacccccacctgctcaatcagtagctgcagttgaataacaaccccaggtgtttcacatgtgggttaaagtgggagaagcacgaacatagactgactctcaacttggttgcacgttggaatctcctggtgagcttcccccgctggctgggtcccacccttggagagagtcatgttctaagtcccgtgtgaggctggatatagggatgggtggaccctttgaggttaagtcaaacatgggtcaaggttaggaaacactggagggagagggcgaagacaatgcttccctaacccgcctcctgaggaaactctcctgaattcagaaagatcagaaggctctgagggtgggatttcagtctcaggagagcatccctgtctccctaggacctggtccctaaaaagcagtggatggaattgtccaggctgcctcgtggatggggctggaagccatgaaatataaagagtgatctggaaactcaggttgaactcctccggcgtgctttagtgggggtgattttttaaaatgtgttataccagagtcatttcttcaacactgggcaaccaatttgctgtacaaagggtttcccagatacagaagttacactccagcacgttgtgtttagtacactctggtttgtctatgagctccgtgctgatctgaactgaagaaactgcactgttttttttttgtttgtttctttgtttttgaggagtctcgctctgtcgcccaggctggagtgcaatggcgtgatctcatctcagtgcaacctctgcttcctgagttcaagcaattctcttgcctcagcctcccaagtagttgggactacaggcgtacgccaccatgcttggctcaattttttttttttttttttttttttgtatttttagtagagatggggtttcaccatattggccaggctggtcacgaactcctgaccttaagtaatccgcccgccttggcctcccagagtgctgggattacacgcgtgagccaccacacccagccacaatatttttttttagatgttcttcaaacaaatgacttcctgcaatttgggagatgatttttttagaacagttttattgagacatcattgatgaacaaaactgcctatacggaagaagaagaacttgatgttttcatagggtatattgtggaatgattactatattccagttcattaacatacctatcacctcaacataattaccatctttgtgtggggggtgaggagatgaaatttaagatctatcctcttggaaaatttcacacataacaatatagtatttttaaacagtcattcctaaactgtacattagatctccagcaattattaatcttttttttttttttttttttttttttttttttttgagacggagtctcgctctgtcgcccagggtggagtgcagcggcgtgatctcggctcactgcaagctccgcctcccgggttcacgccattctcctgcctcagcctcccgagtagctgggactacaggcgcgcgccaccacgcccggctaattttttgtatttttagtagagacggggtttcaccgttttagccgggatggtctcgatctcctgacctcgtgatccgcccgcctcggcctcccaaagtgctgggattacaggcgtgagccaccgcgcccggcccagcaattattaatcttgcatacattactctttgtatcctttgaccaactttctcccatttctcccccctactgctcctggcaaccaccatcccactctctgattctatgagtgcgactattttgcattctatacataagtaagatcattcagtatttctctttttaaaaaataaattttaccgaatggaggttccccaaagaggaaaacacttacgttaaaacaattcaattattcattccttggctaacagctagattgaactactgatctgacttggagctgaagtgccctggaaaacatattttaaaaattgtcactcttttcttcccttgtagggtgctttaaattaagattttaaaatgttgaatattacaggtcaaatgcaattttatataaccacactgaagtggcagacagtgctaaggtgaagagctgaggatttgcatagtaaaataggaacaaggcagttataatttaatttttaaaactctcatttaaatttgcagtgctttaaacgagtattacttattcatttacatcaactttgttggttactacttagtaatcaacagagtttaggagaccataaaaatactctttctgttagaaaatacaacaaaaatataatttttagcagtttgactttcaaactgttctctgtagtgactcacatctgcaatacatctgttttgagaatcttgaaatgtgaaccctgagggttctatgaagcatttttaaacttccagttttacccatttttgactctttttaattgtatttaaacaactcttcttttttattttatttatttattttttttaggcaaggtctcactctgttacccaggctggagtgcagtgttgtaatctcagctcactgcagccttcacctccccggctcatgggatcctcccatctcagcctctccagttgctgggaccaccgacatgcgctaccacacctggctaatttttttgttttgttttgtatttttagtagagacaggtgtttcactatgttactcaggttggtcttgaactcctgagctcaagtgatctgcccaactcagcctctcaaagtgctgggattataggtgtgagccaccaagcctggcctaaacaattattcttcgcgtttaaaaattcattcacgcaagtacatgtttataattttaaaagaaaatggacagaatcctaaaacacaaacatctaaatttaacatgtatctttccaccagtatggaacagttcattcctttttcacacaaaatcagttatatgattggtgcattaactccaatctccatgtttatacagaatgctccatttgttaaacctctctgaaaagaataaaaaattcagatgattaattcacttacacttagaaactaagtcagtataccacaaatatatattgtgatcagttataatacaatatttcttggcctagggtttcaattaaacaacagaaaaaaatgaataaatactacagctaataccctgaaaaaatgcaaaaattcaaactttagcttgccaactaaaacacttgctttgagacggagtctcactcttgtcaagtgcagtggtgcaaactcggctcactgcaacctccacctccggggttcaagtgattctcctgctacagcctcccaagtagctgggactacaggcacgtgccaccactcccagctaatttttgtatttttagtagagatggggtttcaccatgttggccaggatgatcccacctcggcctcccaaagtgctgggattacaagtgtgagccaccacgcctggcttgcattttttttttctacttggcagcaaatgctgatggaattcagtgctgactacttaaagttgagtcacatcacacatttaatcagggtaataagaacatagcacacccactgtagagttacattaagacataaaaactctttgcttgaaatcaataaccgcgctgcacatgggacatctgtcaactgcttcagcacattgtttacaagtgaccagatgtccacaaggaataaaaacaacagcgatatgtctgtccatgcagattttacaaagcttctcctcttgcagacgccttagcggctcttcagggctgatttctctctgcaatgaagtctgattcaattcattttctgtagtgtctttctgagcgctcactagatctgcaacaagaacctcaagcgttttatagttgctcccagatgtttgaattctttcctccattattttcttaacgtccttgaaatcaaatcccattcgtatagcttcttgtagcataggattagggaagatggtatcactgattcttttagttagtgatggtgttttcttggtagtttgtaccagagctccctcaagtgaacgggttaaatgaatgttgtttatatattcatgtcccttctcttctagcagatatttgcaacctggataccatttagcatgctgttcccaaggatcttccttgggcttccagttggctagccctcctccacagtgaaagcactgtactttatcctcttgacctatagcataaaatccagctcttgcaagctgctctttgttaacggagtacatccatgtcccaaaagtaatgagccgggcttcataacccgtcatggatggattccttggagaacttgttgaatttgagaaattcctatcagaactcgcaacatcagattcacctcgaatattaacgttgtggcccaaaataaagaagcaattaggaaaatgtctcctgtgttctgaccaggcacgatcaccaggttcccagtttttcagttttccgccacaacagaagcactgcacttggtcatcagtgcctgtgtagtacagcccagcactggccagctctctcggggtcaagtgggcagaggctggccagttgtgaaacgactgttatctagcttcttcactatgcatggcggggctcctcgggtgtatggagtctgatctatccaccacctgtccagctctcaaaagccggtctgcacgagtctcagacggcctgtctaaagcacaacgcttttcctctcccagatggttttcaacttggtattgactatttgggacaccaggatttgcaggtttcgtggcactgtcttcaaaataaaagctgcggataaacctgcaattcggcgctgctttcttgtgtttgtcaactcctgagcccccacgttgccacctgtctaccgcttcagggcagctaaggccccccagggcgtctcctccaacgcgccgatgcccaggcaggcccaccacctgcaaagccagcaaacgtttttgatctattaatctcttctactaattcttcatcctcattgatgtctgcagacacatacgttttagatccttcgaaactgttcaaagttatcttctcttgaatataggacttgtccaccgtctcgcgccaggatagcggctccaaccgcccaggcgatcggccttgtcccaacgggagggtcccgcggagggacggtccgagccccctaccattggaaatgccaaaccctgccctaagccgggcccagccacccaggctgacgacccacgattagcaccgcgcgctctggggagccgccaaggtgcagccacttcccagagctccgaagggtcagcaagaaaagaggaagccacgaacgctcccagcctccagctggaaaccacgcggtggagtgggcgcttgcgcagtgagcacctcgtgccccacgcccgtgtctcgttcttttttgtgcttgtttcactttgcataattttagcatgatatcgtccagctccatctacgttgttgcaagtggcattttttttaaaggctgagtattagtgcactgtgttttatacacacgcgcacacacacgtgtgtaggttgcatggcactatatgtatatatagtgtgtgtgtgttgtatgtgtatctcacaaagtctttatccatttatctgttcgggcacattgaggttatttccgtatcttggttattctgtataatgctccaaaaaacatgggaattcaagatatattttggggattgtgttttaaattcctttggagattttatatatatgtgtgtgtataaatatatattttttcatataaatataattatataaattataaaattatataaattataccaaatgttataaaatatatttttataaatatatattaaataaatatatattatacatacatatatttttgggggggcagagtcttgctctgtcacccaggctggagtgcagtggcacgatctcagctcactgcaacctccacctcccgggttcaaggaattctcctgcctcagcctcaccagtagctgcgattacaggtgcctgcaccactcccagctaatttttgtattttgggtagggatggggtttctccacgctggccaggctggtctcgaactcctgacctcaagtgatctgcccgcctcggcctcccaaagtgctgggattacaggtgtgaaccaccgccccctgcctcctttggatatttacccagacatgtgattgttggatgaaatggcagttctatttttatgttttttgagatacctccatagtagtttccacaatggctataccagtttacattcccatcaacaatgtgtaaggatttcccacatcctcactgacacttatctttgtctttttgataatagccatcctatcaagtgtgaagtggtagctcattacagttttattttacattttcctgatgattagagatgctgtctctttttcatgtctgttgactatttggatttcttcttgtgagatgtgtctatttaggtcctttgcccattttaggacgagttattcatgtttttggtatcaagttgtatgagttccttatatattttggatatatgtgtgtgtgtgtgtgtgcatatatgtgtgtgcatacatatagatagataatatttttttcagttgtattgcctttctttttcttattgatttgagtacactatatatgctggaaacaagtaattccttggtttttgttctatctttcttatctttttattaatatcagctcttaaattttttataaactgaattgtcatttctccttttatacttcacattaatgcttttcgggctgtgtgagaaatcattttgttctcctttgatctattctaaaaatttcattagtcatctttacaatttaaatcagatatccattcagaattaagttgttgcattgcactaacaattgatactatgttcagttaagcctcatgacttttactggatggaaaccatcatgtttcattacggtttctactctttctctcatcaccactggagctcacatttctgtgaagccttgtggtcattctctcccttcttcctgcctactggacatgttagcaatcccacagcactacaaaacaaagctttgtgtccagaatctttaatgggccttttttctcaaagtatcaattattttcatatatatatatatatatatatatatatatatatatatatatatagacaaagttttgctcttgttgcccagactggagtgcaatggtgtggtctcggctcaccacaacctcccccacaccgcccccgaggttcaagtgattcttctgcttattcattttacaaataaaataaaataaaacaaaataatcccacctactctcctgaatagctgggattacaggcatgcgccaccatgcctggctaattttgtattttcagttgagatggggtttttccatgttggtcaggctggtctcgaactcttgacctcaggtgatccacctgccttggcttcccaaagtcctgggattacaggcatgagccactgcatccggcctattttcatattctaaagggagaagtccactgtgtttagagatattttccccatgcattccttatgtttcctacgtcttttatcagcttctgctccagactctctaaagattttgtgtaaaaaacagccttgaaagatggtggtactgtcttcataggcgttacaagatagataaattatttgaacaatataacaaagataatgccttccactgaggcaaaagttaggaagattttcttgcgatccactttaaaatagtgggggcagggtgcggtggctcacggctataatcccagcactttggaaggctgaggtgtgtggatgacttgaggccaggcgtttgagaccagcctggccaatatggtgaaatcctatctctaccaaaaatacaaaattagctgggtgtgagggcactgacctggaatcgcaattacttgggaggctgaggcaggagaatccgttgagcctgggaggcgaaggctgtagtgaattgaggtggcaccactgtactccagcctgggcgatagagcgagactctgtcgcaaaaaataaataaaataaaataatggaccgggcatggtggctcgtgcctgtaatcccagcactttgggaggccgaggcgggcagatcacaaggtcaggagatcaagaccaccctggctaattcagtgaaaccccatctctagtgataagcagaaaagagggttgaggaagggactttactggcccaaccagaaacaaactaagaacccaggactctattctctcccttggacaccctacaccaatccctgatgtcacataatgcaatttagtgtaatccgcagtgacattgattgttggtgtttaatccaagtgataatgaaaactgacttgtaatgtgcttaaggactttagctccaaaattaatctactgttcagtccaccctaggagaattatagactcaattttcagaattattaagagtgcactacaagaccaccatgcttctcaaagagataggagaggtcaagaggaatcacctaatcctgtgcagaaagggtgtctccaaatggcagttgctggaatacgaatgttttctctcatccttagtgcatgaatgcttagtggaaactgattgtctcctcctgaaaacatccatagtctcttcatactgacagattgttttccatcttctagttaaagaatcagcatttaaggaagtggtaacatacaaactgggtttcagagagcagcccttgggcacaaaagtttctaatgatgtattctctggtttaagcatagtctcatatgaatcccacagtgtactgctggaaatgaaagctgggagtcgcaaagaaaatgagtacttgaacaaaagatttctcagcaaggcaattttacttctgcagaagggtgctgcctataagcctgattgccatgagagcaccccaaacaaaggaaagcagggattcttattcctaacgcattgggcccctactgctgcgtcctatctccgttggctggagctggactgcacaatctagactgataccgattggctaaaaacttaaaactttactaaataggtaaaggcacaatggggaacaaagaaagggatggggttggttgtaggaaactaggaaaacaataacatttccaaataaggaaagaagcctgggctgcaagctgggacatgcctgggcatgtctaggcctgtccggacaggccaggaaacatatgggttaggcctcttggtttacagtacagggatataggattacttatttctttactgtgtttaccaactgcccggggcacaacaaagagttattagtagggtaaaagatttgttaatagtatgaaacatgaaggaaacttgaaagaagcttttaagtgggactatcattcttagaacttaatattattaacaaaaagggaagttttgaagaggaacttttaatttccacagtacaattttgatttgtaaaatacacaaaatttaacacgttaaagattccatttgtacaaggggcttccacttaacatgtttcagaaatcatgctttattgctattacttttacttgtatcaattatgaatatagagataagtatataatttgaaattactaacattaggtttctaccttgtatgattttatcacatattggtgtttcatttcccatagtttggagcaagacatagtgttcagtgatttctgtgataggttccaatttatttctggcataaaagcaaaatcttatgtctgctgccatctcaagatagaggcaattgtgcattctttaaatatgatttgtcatggagcagttcctagagaattataaggtcattctgcgtctatgttatgttaagatatctcaattttatttgaagtttgtattggcatattctataaatctttatccatgaatgtaaacttgttacaaagttacaaaataaaataacaccaatctacaataagaggacaggacttaaaatgactctatatacatctgcattacttgaagaagacagttaaattctcccttgcatagagtttaactccaccactctttaccaaccctgccaaggtcaagccccctctttgctctaaaattttggattttgacaaatcagtagctttatccatctacgtgttccttagctttccagtgaaagtaatagtcctgcctgttctgtgatctgcctgccttggcctcccaaagtgctgggattacaggcgtgagccaccgcgcccggcccgagtgtacctttttgagtcattttccttgagtagccctcatgtttttgacatcatttgtccactcctgttccaaagcaccctttcaaggattgttgtataagaaatcattctaagagatgttgacactgtcatcattgggggtaaaagacagacatgaccatgtaacaaagattctgcctcctgcttgaaggccctacatatttcatgacagtcttgatgatggtgggatgctgagagaaaaatgattttctggaaaaggaaaggacgggttgagggataagagaaggcacgtggtcatggagtacatgtgttcatcaagctggaaacaaggaggagtaggaagcctccctgctcttccatgctagtgaagctcatgtaagggaagaaggatttaaacaagcaactgaatgtgctttgcttactattcattcttttcctggcagaacagtgaagattcaagggtgacttgaaagcattctagcttccgtatttgagccttaagcagccagcaggcaggtggcactgggagggtcgagctttgctgctgccttccttaccagcgcagacactctcctgctctgcaccccagtttcttcctctgtccctatcctgacttcgtcaacattaaagaagaaactaaatattcttggaatttgttgtaagtggggaactcaaacttctacagctctgctggatatgcatgcccctgtttccattctggcctctgtggtgcattgcagggagggtgggctaggtgcgggggaggctgaaagtccccggggataagcatgggtcatgggtgcacgcgtgggcagaaaaagaaaggctccgtatctggccctccctggttgctgaacgtacaagcagaagaaggaagcttcgcagaacttagggtgaagaaacaaaagatgaaacctccctctaccctggcaggccccatgctcaccccatctacacccgcgcatttcccacaggctgcctgggatcctgtggtgcagcctgctagagtgtaatttctctatcagggaaactgtttgtacagcaaattgggtggccggagttgaagagatggctctcacgtaacgtatatttaaaaattaccttactaaagcacgctggaggagttcaacctgagcttccagatcactctttatatttcatggcttccgcccccatccaagaggcagcctggagacttccatccactgctttttagggaccaggtcctagagagacagggacgatctcctgagactgaaatcccaccctcagagccttctgatctttctggattcaggagagtttcctcccaaggtgaaaacgggaggaggcaggttagggaagcattgtcttcgccctctccctccagtgtttcctaaccttgacccatgtttgacttaacctcaaagggtccacccatccctatatccagcctcacacgggacttagaacatgactctctccaagggtgggacccagccagcgggggaagctcaccaggagattccaacgtgcaaccaagttgagagtcagtctatgtttgtgcttctcccactttaacccacatgtgaaacacctggggttgctatataagctgcagctactgattgagcaggtgggggtggggctgtgcctgagggtctgtgtttctcagaagctacgggtctgcaggtgacactctgggcacccagtcctctttgctcaagtaaatgaaacacgatgattgaaatgtaaagaaattggcctgaggtgaaaaggaaaactcaaaacacctgtaaaacgtgtcatagttcagagaattttattcatatggaaagaaattaaccaagcagaattttacaatgacttttaataacaaaagttccaaggctaatagagtacatcattacaaatgaaattcattcacaaacttgaatttactctattgtttacttgtggtatgataataataatagtaagatatattttaccatgtgccattcatgacgtgctttgcataacttattgaatccactgaataactccaacactgagaatattggtacctcaactttacacatgcgctagctgagatgccctctctaccacagtggaaatcagagtctaggtagcttcataaaataaatggagtatttcccttgtttgatgtcctggaaaaatgtataccatataaaaaagaacagtttcttaaatgtttgaattcaatgatttaaaaaaaacacattcttccaagaaaaaaaaatttcccattttccaaggctaagcgtttctcactacaactctccttcacagtcaaatattcttgagtcaggagacactgacgttttccactaccatcaaagggccctttgcccagaattactcaaatttcagtggtttgctccctccctagatgagtttcagagcttttactagtggagcattgtttgcttatgttgactcagtttctcatataattgtatgtaattgaaaaagaaatctataggacactttcaacagccccattttaatacaggttaaatttacacaatgtaaataggcaggttcgttgatccccgatagtatctggggtccacgtttgaacagacaccgctgccagggaggggctgaccccgcacagggctgcttcctgcctctccccttctcagcctttcagccacttccaagtcgcatgggcttgaagctgggtcttcttgccttgggggcctcagtcactgtcactgtcctcagaggaggaagtgacaagaaggtcctcatagaggacactcgttgagacctggggaccccgcccctcaggctgccttgagaagcgagggctctgagcagaagcagagttttcaggaggacgggatgtgggaggcgttctgaacctggggctcttctgtcccttgtcccctctcatgaaggtgacactgccgggcctccctggaacatgaatgggtggtccaggctggaggacggggcagccctgggctgggcccaggaaaggtgagctgggtgcgggctggaggttgactctgggctgcagggttgctgtcttggtggctgctgtctgtgcagtcgcctcgggtgcctgtttggatccaagtccagttgcagtgcggggaggctggagtgtctgcacagcgcccacatccgggagctgagttctcagtgcaggggtctggaaggagctgaatcttgctttctttgcggggttctggaaagtctgggtggggacggggccaggctccttgtctggtgcctgggttctggagtcctggccacactgttttctgacttgctgtggtctgggctttgcatctgcaacgggatgtttgatttctgcctgggatttaaggccaggacccagggcaagcgcctgcatggcaggctggagagcaccatgggaggacatgtcaggcctgttggctggcagcctggcactgagagtgggggtctggtgggagctcttcagaacagggagcagggaggcagtaacgtccccgccatgtcccttggtgggtccacaggtgctcagttgaggtcaatcgttgtgacccgaagggcagagtaatctcatctcgggtttgttgacaggcggtggacctgtggacacagggcccaggacagatctcttcttggtggtgtggacaggcagtggcatggtaggatgctacgggagaaaacatcccacatgagacagctcagcagtagaatttccaaactctgaagcagggaactcacatgcaaaaccacatcacaacagacactgtgtgaagatgagaagcaagctaggacagaggaaaatggacaggctgacatgagaaacagagaataacaggcactgggactgcgtctaaatcaggatcaaatatagggaagaccctccaaaagagacaggacgtaggaaattaaacgtcacagaaaaggatgtacacatggtcactgaatatatgcagaattgtcacttcaggaatagtgttggggaaagatagccaaccattctgtttgctgcgactatcacatatgaaaattaaaaccgtctttatgttctctattgttaatatcaagggaatatcaattccccaaacaacgtggagactggaaatgtcacagctccttttgaaagcagttgtaagatcatgcataaaaatgaaggagacgccttatctgcagccagtatcccgaaggcatctgatcagtcactccccacgggcactgaaatgcgcccagcagcatttgctggccaacttgcaaataaaggtacagaaaccaatgttttaacaaagaagctggaaactggagtatgcaaagtcctcaggtagcgtagttctcctgcagggcagcctaggtcttaacatgacccccacccatgaagggcacagaagtgaaggaatcaggggacctagaggagaaacagagcaggggcagggggagactcaccctcaggaatgaacaggcttccgctggctccttccaggcttcctgcgttttctcttggggagttctgggaaatgtctgcttcggagctctgttctgctgctgctggggactgcagaagaaatcacgttcactgtctggacctgcctgaccctccttgtccacaccagtgactgggaaccaagcaccctcccggaacccagccctagcccttgctttgggtgagggaggcgttcaggcctctgtgaactctgccaagacagccccttctctcatctcagaagcagccccacttccaggaagctccgccccccacccccaccatggccccaggttctctaagttcattcaggccctggaactgctctgcctgcctcgggtaacatccccaggtctcccacagcccctgccctctagagactctcagcgctggaataagctcggagtgcggaccctggaaggcaggggcctccgtccacctccatttggagctttccttgtgtgcttagagaaggctgcacagaaagactaggggagacaccagctcctgaggcgccgacctcacggatcttccttgaccctgcaaaatccttaccttggacttcgctccttttctctgtcattcgtcgtaaagggccctggagtcgtaaagggtagctgggcctttgctggtttcaggttctccttctccttgtgtgagcccaggacctgcagaggaagggccccactccacctcttaatggggcaggtcttgttcctggctgagtgcccaaaggccccgcagttcttgcatttcacctgcaggtggaggaggacacagagcagtgagtcaacagcaatcacaggcacctgcaaggttcacacaaggcctgggttttggagatggattattttaggagggggacatacgcccatgggctgttggttgccaggaaattcaagatattatcgtcctccccagagcccgtttaacagggatcccaggaggaaggacgcttgtgtctgagagtgaagataatgaaccggtgttgaggactcggcaaacaccaggctggacatgacactggacagagaatgaggctgctcctcagagactccgaatgggccaatctgccaagacaggaggctgaccgatgtggtcagactgagaccagtgggaactcttaagtcataatcacgagtcccatgttcaagcccactctctggtgtccataggttaccaacattttcaagcccccactgaccctggattcctcctgctctgctgggagagtcgtctgccccatgggtctcctctgctgctcctgtgggttcttggctccggggggcccctgagcctgatgatggatgggatgaccggccatctgtggcaggtccttgaacttctgatcattcttcttcattaagtggttgttggatttcctagtcataagaaaaagagaaaacattacacagacaccagacgaaagtccctcctacccctgtctacccaagtagggatggagggatgcactggccactgagtcacgcccactgtaacttggtcctctctgaacccaggtcccagttgtgctattttgtgactctctcccatcctgacctactcccagaacaggacacagattttataaaccaaaggctgcttgatttctagagggcgaagtgagatttgcagccttgcataaaagttttctgggctctcggtttgtgtgcagtcagtgcctcagagctgaaaccctctgacaatatttatcaaagccaagacatgaacagccaacaactactgatttttttccagcaagttccagaaaaccaactattttcatagaatagcttctcactcagaaaaccaaccagaagctcaaagctttgcaaagttttcatattcaacctatggacactcgtgacgtttcacgtgagacccctgtgaccacacgccactcttcacacagaggcaggcacaaagccaagtgaggaccagccctctgaggatcctgcgacgctgacacatatgtgcgtgttcacgccaggcttcgcacacatcactggccgtgtcatggggggacacgcaagacggaagcctccaggcgtgttcagcagaaacctcgagcccacactgtgcttcagagtctcccatgccgtccctaccttactccctaatacttatcttacctctcctcttggtatcaaggtctctgtgaaattgtgggtggctggtccactgaagcctggcattttttattcgagacacagcgggcggtcggatcctctcctggcttcagaggaaatcgcagaagaacctccacagaggcgagaacaacccatttctctgtcatcaagtcaatctaatgcagagaaaggagaatggagaggcaacctgagttctgcaggcaggaggaagccttggcagaggagaggaggaactcccatcttcctgagattttaaagggaatgctgggcaggctcacatttcattgttttttttttctttttttttaaagaagtcgttatgtgaaaaagatacttgcacacatatgtttacagcagcacaattcgcaattgcaaaaatatggaaccagcccaaatgcccattaatcaatgagtggataaagggactatggtgtgtgtgtatctatctatctatctatctatctatctatctatctatctatctatctatctatctatctatctgatggaatactactcagccataaaaggaagaaattaatggccttcgcagcaacctggatgggattggggactattattctctgtgaataagtcacgaatgcaaaaccaaacaccttatgttctcactcatgtgcgggagctaagctatgaggatgcaaaggcaatctcacagttctttactccagagctggtgaggagttggctgatgaccttcaaatggcaccaagagtgacagcccagggtattgggaagtgctgctgttcccaggtgggaactaaggggccatggcagtggcattttcccatgtccctttgaggaattacgtatcgattttaatgggtcagtgcccgtgtatggagggtgtgaaactctgaatatgagccggtcatggacggggagcctgcttcagccttcccccaggcttggactccacccattccacctgcctcccaggtgaccccgcagctcccgtactcacatctctttgtgggatcccgcactgctttaagaactgcttcccctgttccatggagagagtgttggggtccatcactgctggtcctgcctgagggattctctttccctgtggagggtagaaaatgagacgctgattccttcctatccctggactctcccaggcacaggatgcagtcagccccatctctctgctgtgcccaccgtgtccctaggagtaaactcacacatcctgtcattcaaactacagggacacatccttcctctgccagtgacatgacaccaatgtgaatgagaaaagcaggtgatccattaaaagaattgttcactggacttagcgtgtttgatatgtatgcaatgcaggtccctcctctggagactctcatagtataccatcaaacatccggaaaaattgatcgtggaattggcctcaaagaaaattcaatatattagaaaactgaatattttaatcatctgtacaccctccttgtcaaaactagatatacctacattttataagttctttctaatattaaggacgttttaaactatgaagcacattccttgaactttctgaaatcagactccttgagatcaaacaagatattcaagggaaaccatcaagtgctaagaaaatacaaaataaagcacttttatgtccaaactgatgagcagtgcaaaatgtgggttcaggggaaatgtctttggctaaatgaccacagtgctagggaaacaggagcataggagagtgagggcgacaccatttagaaatcaactccatctgaaaactagtgaggcacagtcctggccagtcaccaccctggtcctaagacgtttgtggctgaggaagcagcttagcaatgcctggatggacagactcctatgaaagcaaaatgtccagatgccccatatccaaagcaatagataccttcaagataatgatagctatgcttcctgagctacacactagaatgtcaaggagagttttctttaaatcaacagaatactaaacattgtcatgctgtcagtccaccacatgtagacacagcttagttgaatcttcacgtggacaaaacccctatatcagaaaaacttaaagacagtgcattcttctggttgcgttctgaggtcaccgtactctgtaatatagtagctgtcaataaactctcttcacactgctctctgcaatttgcctggaattccttcctgcatgagatccaagaaccctccctcagggtctggatcgggcctcttttttttccacaacaacatgattgaaaaaagataaaatctgggggaagcactcaggcctatggagacagcttacagacagaacaacgaaagattgcaaaagaaataaaaagatggaaatggtaaatcaaacaataaattggagctaatgaaaaaataaatagaatacagcaggaaaacgtactctttctttgagagcagtagtaggatacattaccatgggttaccacagaaagataataaaatttatcttaatagatcatatcagggaaaagaaaaggcaataatgccatgaaaatagaaaaaaaatgatcaaggaatgctatctggagcaaacgcacttgagaaatctagaataaagtgcgcgttccttttcaaaatcaaaattgagaagtgaagaagcatttttaactacatatttaagtaggatcattctttacaccatcattatagactaggcactcacagcttaagtcttgcttgccttaatctttgggtagaggctcagggccctgaatttatactagctcctagcaaaggtcaatgagtatactggaataaaagataagtgaagaaatctcttatctaatagcttcttcgtcaaaggcaccaggtctccataactgatcatccagcacccacacaattcagggtgctgggtgatcattcttagcaaatgttgacctttatgtaatcattaggatttctgaaatattttttgaatctggctatgtcctaagaaatactgttaaatggctgggcgcagtggctcacgcctgtaatcccagccactccggaggctgaggcgtgagaatcacttgaaccgggaaggcagaggttgcagtgagccgagattgtgccactgcactccagcctgggtgacagagcgagactctgtctcaaaaggaaaaaagaaatactgttaaacaattaagtattctttacctcaacatctaaaaccgcacgctaaagagttttcccactattctatttctcccattgggataaatgaacgcccgaaatagtaatggactaacctgttcttcttgcctaccagcagcaactcaggtaagtggacccagggcaaacttcactccttacgctggggcttccacagtgaaggaaacaaagctcactgaggggaaggtcccttctgctggcatttatactgctccagagccccgcagccactccccctggctaacctaatcgcgatatgatctaattacctctccctctcttgatttatttggtgatcctgttcctagcacttttgttttatcacagatgtatacatctaaaacaaataatttgctgtatgctcatctcataaaattttaaagtttaacatagaagcatatggtttgaacaacacaaactactttctgcatgtttcaaatattgaggcatacatcaacagcctggctgcctcattctgcgttttgcaccgaggtgggcagctcggtctccccatggcaggaagctcagtggcaatgtgtactggagattctggcctttgtggggccaaagataagtggtctaagaacagcctggttcactatgtgtcgggggaatagatgaggttgtgctgtatggccgtaggggatgggtcacccaaagtctcagacggggagaactgtaacaagccaacagctcagtttcagcgacagctcctggaaagtcagtggctcttgctttttatccctgacgggaacaggaaggcaaggaggcctccagggtgtggacaggagctcagcaactgagtgggattaagagatcctgaggtctagatagcacctggttattgagggtggagtgtagactcacctctctgctagatgagggggctgagtcaggacgtgggagttgatatagtttggatgtgtgtcccctaatctcctgttgaactgtcatccccagtgttagacctggggcctggtgggagatgattggatcgtggcggcggttttctcatgaatggtttagcctcctcccctgtggttgtgtcctttccagagtgagtgagttctcctgagatctggtcatttaacggtgtccagcagctgcctcctcactctcttgtccctgcttttgccatgtgaaatgtctaatccctctttgccttccaccatgagtaaaagcttcctgaggcctctcagaagcaaaagctgccatgcttcctgtgcagcctgccgaactgtgagccagttaatcctcttttctttataaatgacccagcctccggtatttctttatagcagtgcaagaacaggctgatacaggagtggtcccaagaattctcacagcgatatcaggatgtggggtccctctatcccattcgggtgggtttctcacccacatgaagcagaactgctgaaacttgtttcctgacacatttttatttgcattaataatttacctcccccacatttatactaaaaatccacatacaatgattcagttagacgggaggaataattatttgagatacggtatagcattgtgactatggttaacaataaggtatattattaacatgcaaaattagaaagagagtgaatttcaattgtcctcaccaaaaaagtatgtcaggaattgagatattaatttgattgacttaaaatttccacagcatatacatctatcaaattagtgcaatacaccccataaatatatacaattattatttatcaattaaatttgttttttaaattcacacacaaatgaaaatggaaaaatggccagtagctgatttctgcacccaattctttcacccccaatcatacactacatactgtgtgaccctacgcaaaaataaaatctcatgtctagcactatcaattacgggaaaaagagtatttttttaaacaaagatgtttccaattacagtggattgttttttattgcaaatatttcatagattcaaaaaggattttaaggcgtctcttattaagtatatttaatttacttttaattgacaaatagttcttatgcatactcacgggtccgtggcgtccttaggataggtttaatgcgtggtgattaggttagggtgattaacatgtccatcatctcaagcctgcgtcatgtctctgtgttggggactttccctctcctccctctagctactggaaaccctgcgttattggtaacgatagccatcctgcagtgccatggggcacaacacggtgggttcctaggcgcgctccccagcctgggccctctggaggcgtctcccggcagtactgagccacgtggcgtggactgcacggggtcggtgacttcaaaagccccacttagatcctctgcacttaccccctgcagagcaccgacagccctgctctggaagcgcgggtctgcttagatgtcctaagcaacttcttgcaccaggcgccgccaatgaggagttcggtggatttctaaccaagtcccatttcaccgagagcggagtcccgcggggaccaggaggttccttctcgctccgggagagggcgctcctgcccggcgtttgtagcggcggcttcctggctgcttcccagcgtggatttgcacccggtcgatttcctgcgggtgggcggtgcatgaccctggttggacgccctgtttacccctcttctccttgggctggaactcccagagctggaggcagtgcagccacggctgcgaactcaacaccagcacattcttagaaatggaaaaccctttctttacctctgatgttcatacctgagagtttaaaaaatacttacaagttttattccaggtggcgggctcacttgaaaagcaaagatagatgtagataatcttttgtgattttatgcattcatatgtgaaacgcatttagaatgatatccagtatgcaataaatgttaaaaatttttgtctctttcactccagtttgaaaccgtcattattttttttaatttcttgactccaaagtcatgcattgaatatttcctcagcacttcagctcctggggctggagaagcacactggaaaatgagtgagtgtgctttcagcgatatccgcatttctagaacagcatttatttttgcatatgcatgtaggacacagatacacagggcgggtttggggcgggacctcgtgcggtgcaggcgctgtgggaagcgttgccctaacggctggtctccagggctgcaggtctgggcctgtgtctggcacccacgtgcgggtgtgcgcgagaagcgccgttaaagacagagctcatcctgttagctgtccctctcatccccgcccctgcaacctgagtttcccagattccttacgtcccgcaatgtccgagttgatgcgctgaaagagcaaagagatcaaaaaaagaaaggtgggagaaccgcgccacacattggttgggatatttaggttttacagccgttggcgaaggcaatttagcaattatccaaccatagaagtaacgtgcattcggccgggcacgatggctcacgcctgtaatcccagcagttcgggaggccggagtgggcggatcacgaggtcaggagttcgaggccagcctggccaacatggtgaaaccccatgtctactaaaaacacaaaaatgaccggctgcggtggctctcgcccgtaatcccaacactttgggaggccaaggcaggcggatcaggaggtcaggaattcaagaccagcatgaccaacatggtgaaaccccgcctctactaaaaaatacaaaaattagccaggcgtggtggtgcgcacctgtaatcccagctactcaggaggctgaggcagaagaatcgcttgaacccaggaggcggaagttgcagtgagcagaggtcgccccattgtactccagcctgggcgacagagcgagactctgtcccaaaaacaaaaacaaacaaaaaaacatacacacaaaaattagctgggcatggtggtgggcgcctgtagtccctgctactcaggaggctgaggctgatgaatcacttgaaccctagaggcggaggttgcagtgagccgagattgtgccactgcactccagcctgagcgacagagcaagactccgtctaaaaaaaaaaaaagaaagaaaagaaagaaagaaacaacatgcaatcacggtggagccgcagtacacgtgtcagaaccacccaataatctgcatgttcgcacatcagtgtgttcagccacctacactcccggcagcgtttcacagcaggagacagacaagcacatgcgactctgtacaggggtaaacaggagcgattcagtaacatgcttcattcatacgcaccaggaaataggatgcagtgtttccgagaaggaggtatagaaacatcttccacactcatcactgactgggtgaagcaacacgaacaatgactccaacatgaacacatttatatgaattttgaaggaagacaaaatgccttaatcatgtatatgtgtatgtgtatatacaaatagacctatgtatatgtccatctatgcaaacatatacgtgtgtctacgtagagatttgtctatatttgtatctgtgtctatctctatagatctatgtctctgtatctctacatttagatatagatatgaagatatagatctatatctgtctatatataagatctttgtacatgtatctatatagagagatgtatttatttatacagagatatcaatatataaaggaggatacacctcaaactggtaacaatcgttatgcctgggatcagccttgtatctttgctggggtatttatagctcactttatttaactgtttaaacattttatcattaaattggatcctgtacatatccgtttcccatgactccaccattacacaacgtcagcgccttacaacagcacccatttattttctccccataggtcagaagcccacagtgcttggctgtgtcctccactcagggtctcacaaggaccgaatcccggggtcagctgcctgggcttttctctccaagctcgggggagaatctgcttccacgatcatttaggcggctgacaaatctccttttcttctcatgatttctacctgcctatcctcttcagagccagcagcagcctgtgaaatccccctcttccctctaagccgtgacttcctcttctgcggtgtctctaacttctttgtctgctttaagagctcacttgattacgttagactcctggatcatccaggataatctcccgagttcatttcagctgattgttaattacatccacaaagtctcttttgcctacgtggaacttaacataaccacacgataacatcagggattggagaaccaaccaatgcatttttttatggtaaaatattattgaaaaaaatattctcaaagtatcagcaaaatgattaccactctttatctcttgtgatggtttctggtgagagaaaagcaaggggaaagaatactagaatgttgaattctgtgttttattttcttcataaagcatgtgctatgttttggaaataccacagtaagtaaaaggagctcatcctttcgaacttgggacacaaaataaactcctttcattccatgaccctggcacctcttgtccccacagcatctagtatcccccatatgcttagctccttgcacgcttttcccctgtgcactcttaaaacctgcagcgtactctactgtctgaaaattaacctccttgtgcctttaagcctctgtgctctgtctcctgttcagtatcagttccctgcatttacaggcactctgtctcaacggcatcctttccatgagcccgcagatttaccctatgtcacaaacccgtgcaatgtcacactctctgtcacacactcatgcaatgtcagaccctctgtcacacacccaggcaatgtcgaccccaattctccagcttttctacttaatgccttgggccaaattagcaacgtgcacatcattttatacgttgcacatggtgacgtcatcatcatgagtggtgcaaagtggaaagaagtatacaggctgaatcacaatagagccatgaccgccgctattctccagataggaacctggtgtcaagatacaaatacgtgtgctgacgctgcgagtgtggtgtttaaaggtgagtgggactgtgtgagtctgtgtgagtgcagggcatagtgagtgtgtttgaatatgactgtgggtttgtggtgggtgtgtggatgggtgtgagcctgtggtggaatgtgtatgtgagggcgagtgtctagctgtgtatgtacgtgatgttcctttgatttgtgctgctgtgcatgtacgtatgtgtttgcatctgtgtgtgtacatctgtatgtgaatatatgtgtgtgtgtgtattatagaggttgttcatcttatggctctaatccctgatgtggaaattgagaagcattgaatgccagacaagaataaaatggactcttctttgtaggaaaaaagaaagcattaatttgagctcatatttcatatttcttattttattacaaaaacaaccagtgatcattgctgaaaacttagcaaaaaacaagtgcagaggactgtggcaaccatccaatgctcttgaatcgagtaagcagcatttgcttccctggattgatcaagaagtgactttttagccacctgatccacatcatctagattccaaattaattggcattgagccgttggcatcctgtttgtccttttacttgtatccctttgaaaatccttctcaggccctctgtctgggttcatttctctgcacataacctaatgatgctgcagctgagtggcgtgaagattaggaaagagctcgctttggggcagaacctcccagcaaagcagagtatccggggacactcgtccctcactgtgagtgtgtcacaggtcagaactcagcgtttcctgctccctccatgtaagactgtgtctctccagggaatggagacgaaagagcctctcccaaacactcctcatagtctctgaagagatgctggccagaaacttgtcattgcttttggtgattagcaattgggaagaaaagttgttctgaaacgttctcagctccccaaggctgcactgtcgttgccactgcaggtgaaaagataattgcagttctgaggggaggtgaggtcacagaaccacaaaaccatatctcaaggtctggctgcttccctcccacacgatcctggctgtggcaaccttcgcactgagcccaccgtcttagcagcaagatggagctggggagaaagtctctttcggtctgtagggaagggtgcttcccaggagccagggtaagttatcctattataataagaaattgttctagattgaaaactggtctagttcccaagtcacagaaaaaagaggaatagttcggagccatgagctgagctagcaaaccgaaatggggtcctagccccacaccaatccctggggggtcctgacgtgatttaggagaatccacactgacccgcattgttggtgtttcacccaatcatagtgaaacttgactacgttcttaaggattaacattcttaaatcaatctgtcgtaataatgaaagctggttgcattcttaaggactgtggtactaaaatcaatctgctgttccgcctacccaacaggaatcatagactaaaatttcaggattgctgaggacgtgactataatatcaccatgcttgtaatgagtagactgactctacaggagtcatgtaattccttacacaaacagtgtatctaaatggtagttgctggaacgaaaatgttttctctaattctgagagtgtgcagggcttaatgggagcattaattgtgtctccactgaaaaccaccatagtctgttgattatggtgagactgtctttcctcttgatgttaaggaggcagaatttaaggaaaaggtaactttataataacgagctaaagagagcagctgtcagactcaaatgtgtcctctaatgtgttctctgcttcaaatagattctaacatcacccaaactctctaatttctgtttatcaactatataacacacatccattagagtttccaattttcatgtttgtcacactttaatttaattatgcaaatattgtcctaaggataataatttctttaactcagttactaatggctctagatatgtcatctaagatttgtaagaatttggttattaccgtacactattttatcccatattggtgtttcatgtcctattgttttgggtaagacatgattgtggtaggtgcctttatgcctttgtccttggcacaaaagcaaatgctcacaatgttttttactctctttccattctaatattgatccgtgcttgcagtcattaaatccaatttgttatggcacaggtttctatagtgttaaactgtaattcattcatctacattttttaagatctctaaacctttatttattcagatattgacaaatagaataaatttttgcacatgatataaaatcattacaatatacagtaacctactacaagactaaaatataatgacaaggaataaaaacaaaggtctctgtatgtgtgtgtcttattcaaagaacacagctatctagctttgttagtaaactataatggctaaatgcactctctgtgcaaaaaaacaaggcaggttcaagttcgtgcttgcctgtaagtagggtggaaatgtcactagccacttcacctctctgtgtctatgtccttctcatatttacaatgaaagtaatagtaatgcctgcctcataggtttgtgaaaaaagaagttgccgcacgtatgatctgcacagcagtgattcccacatgggaagtgctctttaaaggttacgcattcaactctcaaaagcctcttaagagaagagtgactttaagtatttctaagggcagagcaatgggaggtggagaatgctgggttgcaggtgacactataaacgtagctcatgcctcctatttccatgcaggacctcccagccctgaagacaaacatcagtgacagacatcagtggcagaatggcctcccggtatgtggcagtgggaatgatcttcttatcacagaccgtggtgggagtcctggggagcttctctcttcttctccattatctctccctttactgcactgggtacaggttaaggtccacagatttgattgttaagcacctgattgtagccaacttcttagctctccgctgtaaaggagtcccccagacaatggcagcttttggggttagatattttcttaatgctcttgggtgcaaacttgttttctatctccatagagtgggcaggggagtgtccattggcaccacctgcctcttgagtgtcttccaggtgatcacggtcagctccaggaaatccaggtgggaaaacttaaagagaaagcccccaagcatgttggcttttctgttctcctgtgctggatcgtgtgcatgttggtaaacatcatctttcccatgtatgtgactggcaaatggaactacacaaacatcacagtgaacgaggatttgggatactgttctgggggaggcaacaacaaaatcgcacagacactgcgtgcaatgttgttatcattccctgatgtgttgtgtctggggctcatgctctgggtcagcagctccatggtttgcatcctgcacaggcacaagcagcgggtccagcacattgataggagcgatctctcccccagagcctccccagagaacagagctacgcagagcatcctcatcctggtgagcacctttgtgtcttcttacactctctcctgccttttccaagtttgatggctcttttggataatcccaatagtttactggtgaacacttcagccttaatgagtgtatgtttcccaactctcagtccctttgttctcatgagctgtgaccccagtgtatacaggctttgctttgcttggaaaagatgacaagatcccctaaactgatcataaacatgtgaaaacatgtaagttgtatatatttgctcattgtttaattgatgattccctcttccctgcagtaatgtacacatgattatgaacctgtcacaatcatgagaaggtgatgaacaagacagggtgaacttccatcccaatggtaaacaatatctagtaagaacaattataaatgaaacgatgaaattattatgtaaatactcatattattaaagctttattaatacctgcagtagagtcattagaggtccatgcaatttaaattaggtcatgaatcatgatgaaattattatgtaaatactcattattacagttttattaatgtctgcagtggagtcgttagacatctatgcaattaaaaaaaattaggtcctgaatcaaactggaaattatggggatctttttgagtgtgcaaccttcagtctgatataataaatctatgcagaaattaagtaagcatgagattgctgaagaaagttacatggggaagtagcaatgtgtgaggtgatcattcaagaaactgaagaaggaaatgttctccggtagtgatgacgtagcatggagataaggttttggtcaataccagaactggggaccaagttataaaatcagacagatagtagtcatttaaaatatgattatatggaaggaaattagtatagcatatttaaatcacttacatatataaacagttagactgatcgacagtaagacaaaggagagtacaaaaaatatatttatgccaaaataaaaacatcaggtgagtgctgtctattaaaaaaccaatgctggctgggtgcagtggctcatgcctgtagtcccaggactgtgggaggccaaggcagaaggatggctcgagctcaggagtttgagactagcctgggcaatatgtaggaacctcgtctctactgaaaatacaaaaaaaaaaaaaaaaattagccaggcgtgttagcacatgcctgtagtcccaggcacttgtgaggctgagatgagaagatcacttgagcccaggaagtagaggctgcagtgagctgtgatcacaccactgcactccagcctgggctaagggagtgataccctgtctcacaaaaaaaagaaaaaaaaagcagatgttcaggatctaaatcagtagagggtaatttttttttctttatcatgtgacgatgccaattgatcatgttagaaagaaagagattttggggtgggtgttctcatatccctaaggcgagcaagcaagcacaaccactcattttattaaaatttacttgaaataacagagaactaaacaaacaaaagaattaacaatgaaatatcttataaatacaagcatttattttaaatagatgacaacttatcttagatcacaaaaaagaatagaaacaaagaaaaactgaaaaacatctttacacttgaatttcataccagccacttttgacttatgtgctctccatctatatatttctgtattgcctcactctttttttttttttttttttttttgagacggagtctcgctctgtcgcccaggctggagtgcagtggcgggacctcggctcactgcaagctccgcctcccgggttcacgccattctcctgcctcagcctcccaagtagctgggactacaggcgcccgccactatgcccggctaattttttgtatttttagtagagacggggtttcaccgttttagccgggatggtctcgatctcctgacctcgtgatccgcccgcctcggcctcccaaagtgctgggattacaggcgtgagccaccgcgcccggccttgcctcactcttaacagcttgctgtaggtattactgtttttgatagacttggcccttgggtttcatgctagagttatgagtggactgcaaggcacaattacagtattagagtattctgggcttccttttatacttcattttaccagtgggtgttgtgccttcaatttttgtgtgtgtgccaattggtgtttagttcatgttgaataactccttgtagcatttcttgtccgctggatctgatggtgatgaatgctgtcaacttttgtttgtccgggaaagacagtttcctcttcctatttgaagggtagctttgctgtataatatttttggatggcagcttttttttttctttcagcactttgaaaatgttgccccacttcctcttggtctgtacagtttttgttgaaaagtctgttgtgagataatttggagcgcccttgagtgttatttgcctcttttctcttgcaggatacttcttacataaataagaatagtgactggtctgcagaaatcttagatttaaaaacctcttgaatctaggaaaccaaatcaaggcagatttcagactttgtctgcagtacccaaaaacaatttaaatataatatcacggtcaaaaccttggtaatacaatcaatgttttaaattctatcctgttacaaagaaagcagattcttattgaacttatgcaaacaactctattgccataaaataaaaatacacatgaagagcttcaaattttaggcagatcaaatagggatcacatttccacctctgttcataaaagtatatattaccaaattgctgtaaactttaggtagcttaatagagaacgttttctgaaatctggaaaacaaatcttttaggttaaataaccaaaactgtatccaaaaagtcattaaaatatgatcttcataagttattaagtctcccgtaattattttttgttgtatttgatctcaattagcagtttcatgaagccattagttcccttattagagttccgaaaatttttacttagtctattgtttttaaggttatcagaaacctgtcttcaggagtatttgtcagagtcttctccatgaatccgattgcaaatgccattagagaagaattacaacagtggatggcaaagacttagactagctacaattaagaatctaggctgggcacggtggctcatgcctgtaatcccagaactctgggaggccgaggcgggcggatcacctgaggtcgggagtgggacaccagcctgaccaacatggagaaaccccctctctactaaaaatacaaaattagccgagtgtgctggcacatgcctgtaatcccagctactcgggaggctgaggcagaatcacgtgaacacgggaggcagaggttgccgtgagccgagatagcgccattgcactccagcctgggcaacacaagcgaaactctgtctcaaaaaaaaaaaaaaaaaaaaaaaaaagaatctgatgatatttagccatcgatgaggaaatttagttatctctatttcatgcatcatggattcactagaatcatgaattataagttgacgccaagaccattagacttctataaattttacataaattttggaacactcacatcaataataaattattcacttgaccagagtgacaattaaaatatttaaaaaataaatacagaaaattacatggatgttaaatttttaaaaatacccttaactttatttaaagctcaacattgctgagtaattaaagcataatgacgataacaggaagtgcacaggaaatcatcttgatgaaacataacatgtttgttctctaggccagttaccaaaaggtaaagaaaaacttcctgcaatgtgattgcttctccctatgggaagcctgttcagataacctggaatttgaacctgaagaaaaggtacttaaattcaattagatactggaagagtgtgtgtccaaagttataagcatacaccctattacagaataagtaaacaaaacaactagtaccttgggcaggggagcatgtggcttttagaaaaagtaaaattatgtgaaattttctggttacatggaaaaaactcagacacatcaagaaaaaccaagaacatagaatcaagttacactggaggaagataaatattttcagtgtcaggtcaatagcagagtcagaactgaaaaaaaaaaaaatgctgtagaagcagatgaaaagttgagagagagagttatttatttcagccaagcaaaaagttgtaccccctcaagaagaaaaggaggaagagctgaaggcaatgatgcatgagatgtagcaaaagttgtacttctgaaatatgaatctgaaaagcttcaaaatccctctattttgagaaatgaaattactatttaaatggagaagatcacattttaaatctggaattaagtagattaaatgtaaactgtaaaacaggaaaaaaccttgcaatgcagacgatggttgaaaatggatagaaacagatttcagaactaaaaatcaaatcctattgtaatttttattaagagcaggtcaacatttcaagaaaaccccgttgctccacacataatagaccagattctgaattacatcagtgcacccctgacatcaatgctcaattcttaggaaaacttataaacaatttcctctcaatgccagccaaccccatcacacaaaaattctttcccaagacccatccttcagaaaccctccacgttgctgggcgcagtggctcacacctgtaatcccaagactttgggaggctgaggtgtgtggatcacttgaggtcagaagttttgagaccagactggccaacatggtgaaaccctgtctcttaccaaaacctcaaaaattagccaggcgtggtggcacatgcctgtaatcccagctacttgggaggctgaggcacaagaattgcttgaatctaggaggcggaggctgcagtgagccaagatcgcgccactgcactccaacctgggtgacagagcgatattccatctcaaaaaaaaaaaaaaaaagaagaagaaagaagaaagaaagaaagaaaaaaagaaagaaagaaagaaagaaagaaagaaagaaagaaagaaagaaaccctccatgtcttgctcaggctttccattatttttaaaaaccccagactttttcctacctttctccttttttatattggaacaaccaatcattctattctggtacaaaaattgactttctattttctgttataattgagaccacacaggatactttctcagacaaaaatacttttagtatacattttgtattcataattacatgtactaattagaacttttaattcttaggaacactaaattttaataaaaacttagtaattttgagctgttaaatattaacattttatgaatgtatttcataatagctggaaaatattgtaggaaacaatttttaatgtggaactgacatgtaattgattgacctatttttcctgacaaattacttgatcttagtgcttctctccctctttaacccaatagtgctcgttcatctattttggcagaaaaaaatatatgaataacatatagacaggaaaaagtataaacataaagacaaacaaaaacaaagactttatagtttttaaaaatttattttgttcttacattatatttgtacatatttatgggatatgtgtgaaatgctgttacatgcatagattgtgtaatgatcaaatcggaatattcagagtatccatcacctgagtatttatcatttctatgggctgggaacatttcaagtcttctctagctattttgaaatatacaagagtgttgttaacgatagccactatactctgctatgaaaccttagaacttattccttctgtctaacggtgtggttgttcccattaaccaacctctcttcatcccccacgccgacacacaccctttccagtctcatgtctatcatttcactctctacctccttgtgaacaacttttttagctcccacatatgagtgagaacatgggatatttgtctttctgtctggcttatttcaattaacagaatgacctccagttccattctctctttgtctcaaagagacaaagtttctttgtaatacgtcatatgtcatatatagcatatgacagtttgactatcatatgctatatagatgatctttgtggcttatacctatatggaaatctctaagcctcctgtatttcaatgtctaattctcttgctagacttggaaagttttcagctattattttgttagtgtttttatgcctttgaccttctcattttctagaatactcaaaatttgaaatacttagtctctttatggtgtcctatatgtcacataggttttgttcattcttattttttttttctctctctctctcttatctgggttatttcaaaagacttctgcttggtctagtctattgctgtgcctctcaagtgtattttttattttgtgtattgaattcttcagttccagaactttgctttagttcttttttataaaatctatctctttgatgaatttctcattcacagtttgaactgtttttctgatttttttttgttgtttatctgcattctcttttacctcactgaaatttcttaatatgataattttgaaatctttttctggcatttcatgaatttatttttattggaatttgctgttggagaattattctgatcctttgtcaaattgccttggttgttcacgtttctggtgtctttatgtagatatccatgcagctggtgtaacaatcactcctttcaatttttcattgactttcgtagaggaagactttttcctgaagatgtttctatgatgataactgggaaggatactttagctttgcacagaccatggtgaggctttcctaggaataagaacggcagctgggccagccttaggcctctgtggtagcagcagcgagccatgcatgctttccttgggcccttaagaggcatatgcaggcaccaatgttagtgagtccaggtggaccaattctcaggccttcaggcagcttgctcagatgccggcagtggcagtggtaagccagatgggtaagtagaactttgagcttccaggcagctgtaaaatcagtaacctaagattgcaccttatggaactgggaaaagaagaccaaactaatctcatagctagcagaagggtggaaataaatattagaagagagataaatagacaacagaaaaacagtagaggaaaacaatgaaataaaaatgtcattctttaaaagatcagctaaacattaataaatctctagctagactgactaaaaaataaaaaataagagaaacatgcagataacccaaatcagaaatgaaaatgggaacattctacttacttttaaagattattaagaataaagataaatttagcaattgaagtagaaagtggttaaaaagatcataaaagactgttatgaacaattgtacaacaagttagataacctggattaaatgaataaatttctagaaacacaactagcaaacgtgactcagaagaaatactaattctgaatagacctattctactatgatctgtttctactcacagcactcctgataccaagtatgtaggggtttttcccaccaacaacaaactctccaactctccagacaccaactgcttgtccaattattcagttcaatttgacatgacctgcaattagggcagctccgtaggttaaggattcagttccacaagactgccctgcacatcagacaccaatcacaagtctaggccacccatacttctgattaactggctataaatcaaggtgccgtgaaatcctataattttatgttgccttagcatccattctaaatataagctagattttcccacaccagtagtagggcttagtcacccttgacccagtttccagttctctgcctcctcacaggtcctcagtgtggtcaatccagacatttgctttatataattgcctgctggtcaccacccctctatagaggagctacatacaacctacttgcctcacccactgacccctcccccaacaacttctgcactgggcatggactgcgcaggtatgccacagtgaccacctcttggtcaccgcatgaccccatggaactcatgccgccttgctttaaatccaccagttggcctaggcgccgtggctcatgcctgtaatcccagcactttggaaggctgaggtgggtggatcacctgaggtcaggagtttgagaccagcctggccaacatggtgaaaccccgtctctactaaaaagacaaaaattagccgggcgtggtggcacgcacttgtattcccagctactcaggaggctgaggcaggagaatcgcttgaacctgggaggcggaggttgcagtgagccgagatcgtgccattgcactccagcctgggcgacgagaaaaaaacttcgtctcaaataaataaataataaatccaccaattagaattcccctccaaaatctgcttgggtaatttcccagtccctagttaaggctttagggccacatatcctccctctctgtcactccccacccactggttgcacatgcctgtcttgaatggcttcccacttcccactggccctgcaatgtgtgctgctgtcttctctcggatctgtaagtaatagatggcttctgatgtttcatacgtatgattgtgctgccttctctgtgtcttacctggccaacacactcgagcctcgcttttttcatggttagagctttcctagagagtggttatcaagagttatcttgtctgacaccaatcagacaagagccacaagggcatctgccagtataaacaagtttcctgtgagcggaacacctggccacaggtcacacacttaggcattaggcagtctgccaggataaagcagtatcccatgaaaggcacactgtaaacatccacaatcatcttccctagagccccatcagggcaggcctagaatttaagccacttttcagagagagatctgaagaccaaattagaaagaatttttacaacatgagcattctcacaactccctccttgggttcaataatttgctagaatggctcacacatctcagggaatacagtatacttattaccagcttatgttgaaggatattataaagcaggggtccccagcccccaggctgtggaccagtaccagtctatggcctgttaggaactgggctgcacaacaggaggtgagcatcgggggagtgagcattactgcctgagcactgccttcagatgagtggcaacatgagattctcatagaagcattaaccctattgtgaactgcacatgcgggggatctagggtgcccattccttaggagaatctaatgcctgatgatctgaggtagaacagtttcatcctgaaaccatcccccttctgccatccatggaaaaactgtcttccatgaaaccagtccctggagccagaatgactggggaccacttttataaagcatacaaatttatagccagatgaagaagtacgtagggtggggtccaaaagggtcagaagtgcaggaccttctgttccatggagttggattgcaccaccctccttgcaaataggtgcattcatcaacccagaggctccctggaccttgtttcaggtttccatgaaggttcccttatgtaggcatgactgactaagtcactggccattggtgattaactcaaacttttttggcccttcttccttccctggagaggaaaaaggggtgtacagctgaaagttccaaccctttaatcacatggttggttcctctggcaaggggcccaccaagagtcatctcaacaaaaactcagatatggttgaggcttaatataataacaaaagacttactcctatcactcaagaagtttcaacggttttacagtctctctgccaggaacctgggacctagatcaaacatatattttttattttatatcacaatctataacaagaaaagagagggaataattttaaaactactcacaaagaaaagggcaggatcagatatcttccttgatgatgtctatcaaacatttaaagaagagttaacaccaatctttccccaactctcccaaaaagtagaagggggaaacatttcttaatttatcctatgaagccagcattaccttttttatcaaagccagacaatgaaataacaagaaaggcaaaccacgggccaatagccctcacgcatacaggtgcaaaaatcctcagcagcatacaagcaaatcctatgcagtggcttaccaaaaggattatacaccatgaacaagtgagatttatcccaggaaaacaggaatgcttcaacatatgaaaatgaattataatgcaccacattaataagatgaagcaaaccacatggtcatttcagttgatgcagaaaaagcattttacaatattttacagcctttcatgattaaaaaaacactcaacaaactgggaatataagagacttcttcaacatgataaagagcacttatgaaaaacccacacctagcattatactcaagggtgaaagactgaaaacttaccccctaagatcacaagacaagcccagttttgacagttctattcaacactgtattagaaattctagccaaagaaattagacaagaaaaaaatttcaaatttgaaaaaagatgaaatctatctttattagcagatggatatagaaaatcctaaagaatccacacacaacaaactattaaagctaaagaataaattcagcaaagttgctgatacaagatgggcacacaaaaatcagttgtatttctgtgctagcaatgaacaatctaaagaggaaattaagaaaacaactttataatagcataaaaattataaagtacataataataaacttaaccaagaaaattgcaagacttatacatagaaaactacaaaacattgccttgacctccctcagttaccttgtgattctgtgtgttgtgttgggacaaatggggaggtgacagagagaggccaatattgtgtaaccatgtaaccagcactgacatttcctcaagaatattcccccaaagataagcctttgaactgcatagttgctgtgggtggtgtctgcacattctttattgggataatgtgtgctcttaagccagggaccccaatacccctctttagttgtgcccagagacccatccctaggaaaccctcctccagtgaaaactaccagtttcctgagtcttagcccctcactctttaccttctttctggagtcacacaatcctggaagctccatggggtccaattcactcttgagagcccataatgattcccccattctgctatgaaatcccacagcacattgcaagccctaataacatatctattcatgttgtaatgacatacataaattgacccatggacccaatgatccaggagcccatatttccacttacaacaccctctcccaaagtcatacacctctgtaatatcctaatcaaagagatatttctatgatggtaaagtaatttgaaagtaatttagaaattataaagaaaaatcgaatgaattcaggatccaagttaaatttgtgaatataggaatggaatataggctgctggggaatagcaatttctggtggggaattgagaccgcaacacaccacagttgttaccagtggagggtgtccaggttcttcgtgtcttgaacaaagaattggacaaaatgcataaattaaggaaggaataaatggatttattgaaaatgaaagtacactccacagtgtgggagctggcccaagcatagggtctcaagggccccgttacagaattttcaggagttaaataccatctagaggattccagtggttacttggtgcatgccctatgtaaataaaaaggatgaagtaaagttacaaagtcatttactcggtgtacgccctatggaggggctatttcctgtcatagctgaagtgtgaagtggccttatgtttcatgcctccagatcctatttgcctgcctcacagctaacatatgtgattcgggacagaagaaactcatagtgtcacaggacaggagtctgtcatctcccgagacccaggggactcctgaagacaacgacctcgtgtgaaggggagttctagggagaggcagatgctgacccagggaggacttcaggatagggactttcagggaagcagtaaggcctgcagaatcctaggcccaggaagaagatgcagcattcagggctgcacttgagaggcctaaaacggtgagggaggcagagctcaagagcttgactctatctcctgagtcagggatttatagggaataaggcaggggagggaagacagtgaagggactgaagtaggaaaatgactcagcagtgtgaagaggcttaattctccctgttgaaaacgagatgccctaccgtcctttttcttagaacatttactttagaaaacttgtaagcacttctctcttagacatgcatttgaatgcctccgaaaactgggtcgttcttttgccagctttatgacccagtgatgtctttctaaagaacctgggaaacttctctttgaaatgtaaacattaaggaaaatagcaccccatcccctagtttctgtgggagtgtaggagcctcgcatcaggctcttggagccttaatccaagctgcaaaacgacttcttgtcataaagtgtatgaagtttgtgtttcctctggataaagccaattacctataacagatggtcaccccaactaccaggtgaatctaggatgatctatgtgtgaccaatggggcagtcaagtcctcttacttgagaactagctattatttgccttgaagacaagtatgttctacttggctacataaaagtgcgagatttctttgcgtctttgcaatggcttagtggcttgcctgtgacgcacatcacatttgggtttaatgctttttcaaactattttctttctctaccatctttgcagagaggttttctacactgggaaaagattttgtttttaattgtgtctctccaacagcaggcagtgtctacagagcttcgaggcacaaacgtcgtttcaaggacctagcctgaggacgactttaaggggatacagatgcgcaggggagcaactggattcccagcgtctcataatgacgccgggactctcaagagaggaatgggtgtgcagattttaaagtctagaggatcccggacatcggtgcggaacactgtagaataggagtgcaagtttgaaagaggaagacggaaacccttctcactgacgcgtgacctctccatccgcttccgggtctgcgggcaatccctctcatggcagggcggggtcgcagcgtcctggaccagcgcctagaccctggctggtctcgcaatggagagggctggatccgaggtgggagccgagataggggcgggtctgggaaaggggcggagcctggccttcctagtttcgccccgccccaggaagtttcccggtctgtgggttatttttctgcccaactacatgatggtcctcatttgcagccatttgaatctctgtgatgtcttcctttttctacatagacacggtaacagtctgatctctctttccaccacaatcttacaagtgtaataaatgtggcaaatttttcagacatcgttcatacattgcagttcatcagtgaactcaaactggagagaaaccttacaaatgtcatgactgtggcaaggtcttcagtcaagcttcatcctatgcaaaacataggagaattcatacaggagagaaatctcacaagcgtgatgattgtggcaaagcgtttacttcacgttcatacctcattagacatcagagaatccatactggacagaaatcttacaaatgtcataaaggtggcaaggtcttcagtctgtgggcactccatgcagaacatcagaaaattcttttttttttttgagacggagtcttgctctgtcgcccaggctggagtgcagtggcacaatctcagctcattggaacctccgcctcctgcattcaggcaattctcctgcctcagtctccggagtagctgggattagtggtgtgcgccaacacatcacgctaatttttgtatttttatttatttttattttgtattttattttatttttgtcttcagatggagtctcgctcttgtcacccaggctggagtacagtggtgtgatgtcactgcaacctttgcttcccaggttcaagcaattgtcctgcctcagcctcctgagtaagctgggattacaggtgcctgccaccatgcctggctaatttttgtatttttagtagagagggggtttctccattttggtcaggctggtctagaactcctgaccccagctgatccacccacctcagcctcccaaagtggaaggattacaggcatgagccactgcgactgacttttttttttttttttttgagcctgttttgcagcatttacaaatatcagggttttcccacgagatcatgaagattttcacataagagatttctggccatttgtgttggtgttggcagtccaggtcaagcaggaatatgtaataacattcaagctacccacctttggccacattcctgcatttgtagttcatattttgatgaaactcagctacttgggaggccgaggcaggagaatcactggaacccagaaggtggaggttgcagtgagctgagattgcaccattgcactccagcctgggcaaaaaaaaaaaaaaaagaaaagaaaagaaaagaaacttagtctaaaaaaaaaagtcatgcctcttctcctcctctttccgtcatcgtggtgtgtgcttgactccgcttcttgccatgtcttctcacaagactttcaggattaagcgagtcctggccaagaaaagcaaaattgtcccatttcccagtggacttgcatgaaaactggcaataaggtcacaatcatgttaccatatcaagctgaaagtgtcaccactacctggagagttggacatgttttattgggaatatattttttaatctctgaatctgttatgaatgcattggttggctgggttcaataataaatatgtaaacatttcatttcaaaaaaaatgtcaaatgaagtaattcgatagagtaccttgatctttgttttgtttttttgagctggagactccactatgttcagtggatcacacctgtggtccacgcaccttgggaggctgaggtgggaggattgcttgagaccgagactcctggtaatcttctcgtctcttctaacccagtttatgacagacccttggactttactttgttatccacctgtgacccggaagccccccaattccagttattgcacctttccagaccaaaccaatatatatcttacatgttttgattgatgtattatgtctccctgaaatgtgtaaaaccaaactgcagcctaaacactttgggcacatgtcatcaggacctcctgaggctgtgtcacgggggcatttttaaccttggcaaaatagatttctaaattgagtgagacccagtagatacttttggttcacgagctcatgaacacagaaaaaatcaagagaaaaaaatctagagagaataggaaaaaaactagatgtaatggaaagcacaaaatcaggtccaaaatctgaactctttcatatgtactcaacataaggaaatgctcttcaactttgtgtgaaagatagattacgaacatttgattaaaataaaaacccattctatgtgattttagccaatttaaccctgcaaataatgatcaattatatacatacataaaacttcctaatatttcacttagtgttgctatttctatgttcttggggcagaagctcagcctgtcagatacattacaagacagtggtgtctccataattgtgcttaggactctgtgttgcatgagtggacaaactgttaagcaggaacctaggagagctagggtgtcaaagttcaagtccattaaaactagcaagacgtaggccgggcgcggtggctcacgcctataatcccagcactttgggaggctgaggcaggtggatcacgaggtcaggggttcgagaccagcctgatcaatatggtgaaaccccgtctctactaaaaatacaaaaaaaatagctgggcgtggtggcgggcgcctgtagtcccagctactcaggaggttgaggcaggagaattgcttgaacccgggaggcggaggttgcagtgagccgagatcgcgccactgcactccagcctgggcgacagagcaagactctgtctcaaaaaaacaaacaaacaaaaaaaacaaatagcaagatgtattccttactgctcactcacgagtcacggttataagatgtttacggttaaggaaagcagcttattgatacctgcaaggacaaactcctacagaaacacaatgtccagatgacccaatatcccatgacagcgtattcttttaagatagcaggctggggttgaactcctgacctccagtgatccgcccgcctcggccttccaaagtggtgggattacaggcgtgagccaccgcgctggcctgaagtggtattttttagaaaccacgtaatccttttttcagcttaataacccccatggatgtatttctgaaggacttggggtctctctttgaaaggcaaagaacaagggagacagtacccgtatctcggtaggaaattaaatatttcaaacatcaaataattccaatgtaaatgtatggatctttaaataattctgagccttgaaaggaatgtggtcatgcaagctgagtccagtggtatgcaggcgcaacttctaagagttttcctggccagacgcggtggctaacgcctgtaatcccaacactttgggagtccgaagcaggtggatcacttgacgtcaggagttcgaatccagcctggccaacgttgtgaaacccagtctctactaaaaatacaaaactattagccaggcttggtggcgcgcgtctgtaatcccagctagttggcaggctgaggcaagagaactactttaacccgggaggtgaaggttgcagtgagccgagatctcgccactgcactccagcctgggtgacagagaaatactctgtctcaaaaaagaaaagaaaagaaaagaaaaatctaaatataaaaatgaaagtaatagatctcttccacaaatgtgctgggacaactaactggatatccacgtgaaaatgaataatgttggatccctaactcacaaaatcaaaaattttatttaaagaaattttaaaaaaggagagagagagagacgaggaagggagcgctgccggaggaggtgttactttgtcgcccaggctaacttggaccccccccccggctcagcgatcctcctgccactgcttcctgagtagctgggacctcaggctttcgccccgcgcccgcatctctgctgtgtttaagcagtaggtggtgacctcactcctccctggcctgagcactccgtcccgcatcccagggggaggccctagggaaatctctgaagctgaggacagggtggactctcctttcccagtgaatggagaatagaaagggagaggatttctattctgttctgtgggccgtcagcatgaaatcgtatgttccacccaggcagggctttgcatttcacattctagtttgcatccccgtttcagacaattccagggcttttgaatcatgcctcagccttcctgtccggtctcgcctccaaagctcgaaaacaagaggcgctgggagcgaggttgagagacgcacgggtcccaccccggccccgccttctgccaattctaaaggggaaggtctctccgcttcgcgccccgcccctacctcgctcaggccccgcctacctccccgcgggtcccgcccaggcctggcttctgtcctgcgcgcgcagattcgcgcaaacccggaagcggatcgcatggagtgatggtcccaccgcagcggtgagttttgctctgtgttgtgttaagtctgcgcttcccaagtccccggcgcttctgtacctgggacgtggggtccccatagacctggaaattctcacccgtgttccttcacctagagcaaatttagacgtcctcgtcagagtccaggggtcgcttccttttgggtttaaagtcgccctgaggatggtcccttcccgaatctttctgctatagggcaatgtatacacttcccatcgcgtagtttccctgctcaaaacctttttctgactcctcccgacccgcactttttaaagtccttaccgcgaggcggattcccgcccttggcgcctcccagtcttgtcttaaggcgccgtcgccccccacctccctcctcgttccaggcccttatgctccccaggtctccccaccgcagtcaccgcttaccctgagcccgcgttggggaggtgcccggggctgtcctatgacaccgggtgttcttgcctgccctgcaccagcccctggaaaatgcgctcctccgggatgcaggcgtcttactccaaagccctcctgtgattgtgttggccaaagggatcaggagactgagagagagagcagtagaaaacctgagacagagaaaagaagaatgagaaagaccataacagatggcaaagtagaggatgagtgagggatttgccaagagagagcaaaaatgaaaaaaacaaaacaaaacaaaaaacagcaggaggagcagatcccagggaaaaagaaaacaagagctagagagagaaggggagaatgagagatatgtacagaattagggagggaagcacagtaatgaagaaaggggggctgggcgcagtggctcacgcctgtaatcctagcactttaggagactggggcagagggattgcttgagtccaggagttcaagaccggcctgggcaaaatagtgagacccccccccccatctctgtcaaaaaaaaaaaaaatttaactgggcgtgatggtgcacacctgtaatcccagctgctctggaggctgaggcaggaggatcacttgagcccaggaggtccaggctgcagtgagcagagatcatgccactgcactccagcctggtcaacagagcagagcctgtctcaaaagattaaaaggggtgggggactttgggttcagatgagtgggtgagttcattggatatgattagttgtgatatgttgacttctgtttatataatctaataacttagaacttgtttaaattatacagatgatattgagaattttaaaattcctatctataagacacatacattctgtaaatcttggcattagaggtcagcttccacttggaatccctattcagccagagggtagtgacttaattcaattgtgagagcctctcttccctcttcccatggtgaggtaggaaatggggcagtgaagtgggagaaaaaaatcactttctgttattatgtaataattttaatttaattaattaatttatagtttgagacagggtctggctctgtcgcccaggctggggtgcagtggtgtgatctcctctaactgcagcctcgacctcctaggctcaagcgatcctcttacctcagcctcctgagtagctgggaccacaggcgtgagccaccaagtccggctaggttttgtattttttttttgtagaaatggggtttcactgtttcccaggctggtctcaattctggcctcaaaggatcgtcctgccttggcctcccaaattactgggattacaggtggaattacagagaggagccaccgtgcctggcctacatagtcgttttttgttttttgtttttgtttttgtttttgtttttttgagatggaatctcactcttgtccaggatggagtgcaatggcacaatctcggctcgctgcaatttccgcttcccaggttcagactgattctactgcctcagcctcccaagtagctgggattacaggcatgagccactgcatccagctaattttgtgtttttagtagagacggggtttctccatgttggtcaggctggtctcaaactcccaacctcagatgatccacccgccttggccccccaaatgctgggattacaggcatgagccaccacgcctggcccatagtactttttaaaagggacatcagggcgtagtggctcatgcctgtaatcccagcactttgggaggcggaggcaggtggatcacaaggatcacaaggtcaggaattcaagaccagcgtgaccaacatggtgaaatcccattgctcctaaaaattcaaaaattagttgggcatggtggcatgcacctctaattccagctacttaggaggctgaggcaggagaatcacttgaacccaggaggcggaggttgcagtgagccaagattgcgccactgcattccatcctgggcgagagcgagactccatctcaaaaaaaaaaaaaaaaggaacatcaaagctgggcgtggtggctcatgcctgtaatcccagcactttgggagccaatcacctaaggtcagtagtttgagatcattctggccaacatggtgaaaccctgtgtctagtaaaaatactaaaaaagtaagctgggcatggtggcatgcatctgtagttccagctgctcgggagcctgaggcatgagaatcacatgaacttgggaggtagaggttgcagtgaaccgaaatggtaccactgcactgcagcctggggggcagagcgaggcttcatctcaaaaaaacaaacaccaccaccaaaaaatgaaagcaaaaggcacatcaaaagtgcttttgttctcgttgtgtaacatattttcttttttttctttctggttcctcttccttcctttctttctttcttttttttttttttttttttgcagttttactttgagataaatcttagttttaaatatttcttttttaatacataatcacttctgaaagatgcatttgcagcatcctataaccagctcacattgttcagttattttcccattgacatctgaatttgttcgattttttaaaaaacaatttccaaatagtttctgtttgaaattagttgcgtccagttcagatcgaggtctgcatgctttctagtctttattatttattggaaacctttaacatcaaaatgtagtttaacgagttagcctgtttttcagttttgttgtcatttgttaaaatcttgagctgtgagctattaagtgcatgtttccctcaaggcacctctggtccatgtggacaaatgttgaaagcccaactcctcactgtggctccatagccctgtgtccagggcccctgccagtgtccagcctcctcctgggagcttgccctcatcgcatgactgtctctgccccagtcatatttgcttttctcttttcccaaacactaaaacccttcctgtctcaggttgctgtccctgctcttaccctgtgttcctaaatgatcacggccctgtgcctttcttctccttcaggtctaggctcagagatgtctcccatgccctcccacccccatctgaagttccctctgcccgtcagtctctatcacgttactcagattttattatctctgcatcagtcacatcagaaacactctttttattttattttcttttttttagacagagtctcactctaccgtccaggctgtgagtgtagtctggtgaccttctctccctgcaacctctgtcttctaggttcaagcaattcttctgcctcacccttgcaagcagctgaaattaaatgtgtgtgccaccacagccagctaatttttgtattttaattttaatttaatttaatttaattttacttttgagtttcaatctgtctcccaggctggagtgcagtggcgtaatcatggttcactgcaacctcctcctcccgggttaaagtgattctcctgcctcagcctcctgagtagctgggattacagagtcgcaccaagcccagctactttttgtatttttagtagagatggagtttcaccatcttggtcaggctggtctcgaactccagaccttaagtaatccacctgccttggcctcccagagtgctagggtacaggtatgagccaccgcgcccgccccaatttttgtatttttagtagagacagggtttcaccttgttggccaggcttatctcaaactcatgacctcaggtgatccgtctgcctaggcctacccgtgtgctgggattacaggcaagagccacagtgcccgcccagagatgcctttctgcatggattattttgagtgttttgtgtctcccttctttggaggatgcacagttcccatcttggccacaggacaactgcagcacctactctggggttgtggttcagatgctgaggcgtcttcagggaagactcagggcctggggcaagtgcaaggatggtcccacatttcttctggaaatttcaattctaattgatctgaacttcctgtggctatttatttcagtcaaaataaaaggagaaggcctcactaaggtcagaaagccctacagaccagaccctgtgtcctcaggcagtgccgaggcatctccatttttgtcatctgtgtcactgcctcactccagctcccgggtctccgtgctctgtacatcaccaggacccagtttggccattatgggcaggggctttgccaccagtaggtgatgcgctcagcgtcaagggtcctggattcccttcaggaagggtggggagaaggtcagggacctgaggggcatgaaggacacactcctacacaactagttctgttccggagcagctggaggctccgtgactttaggaaagattcttccaagaatcaagagtgcaaacagcaccgtgaactgcagcccgagggccacctcctcctgccaggccagtggtgatgacgctctactggcttttccttgcctgtcacaacacgtgagcacacacacacacacacacacacacacgcacacacacactcccacacacacagtcacaaggcagctggggagtcgaaggtcaagatgctataatgtaaatgtgtggccgtgtgtggtggctcacgcctgtagtcctacagctttgggaggctaaggcaggcagatgatgaagtcaggagttcgagaccagcctggccaacatagtgaaatcccatctctactaaaaaaaaaaaagaaagaaagaaagaaaaaaaaatgagccaggcatggtggtgcacatctgtaatcccagctactcgggaaactgaagcaggagaatggctcgaacctgggaggcagaggttgcagtgagccgagatcgcgccattgcactacagcatggtgacagagcaagactccatctctaaataaataaataaatgtgctataatgtaaatgtggagcacaaatattttttccacaaagaggggccactggttcctgggaagggagtttgagggttatagccctggtcatggccagaagacttaggaactggaggaaggaaaagctgtatttatcctcacaggatgctcctgtgaacagatgggctgatctaatggagtgacatttagaaaaaggggtttttctctccacccagcacacaccgtcacccaccctatgcacagtcctccctttcccgttgtcttctctagaatgacaaagttgatgcttccccaggtgggcgtctgagggaggggagtggtttccctgcctgtccttgatcccctccctcaagtcttccaccttcgtgtccgctgttctgttctgacactcattgcctgcaattctatcggtttgcaccatcccaagacccaactaagacccaaggatttgagtctgggaatatttaagccaatgtcattgccaagtcagaagtcttagaccccaggaatttttcttcattgagagtctgggcagccaggaagcctctcctctttctgcagagttgaggtcaaccaggaccctggcacatgtgagaccccagaggggacatactagtatcactcagtcattctcattcattcactcactcagtagctatgaagctatagtatatgccaggggacacaaatagaggtgctgtctgtgccagggatcaaaatgttaaaccaacagactatccttccctgctttatccaggttatttttcatttttatttatttgaggtggagtctcactctgtcacccaggctgaagtgcagtggtgcgatcttggctcactgcaacctccaacctctgggttcaagcgattctcgtgcgtcagcctcccaagtagctgggactacaggcacacgccaccatgcctggctaattatttgtttatttattttgagacagagttttgctcttgtgtcccaggctggagtgcagtgccgtgatcttggctcactgcaacctctgcctctggagtttaagcgattctcatgcctcagcctcctgagcagtggcgattacaggcgtgtgctaccatgcccagctaatttttgtatttttggtagagacagggtttcaccatgttggccaggctggtttcgaacttctgacgtcaagtgatctgtccgctttggcctcccaacgtgctgggattgcaggtgtgagccactgtgcccagcctcatctcgtggctttaaactttacccccatggccccatggcccctgcagacctctcccctgaacgctacagtcctgtgtccagttgactccttaactctctgctgggaggatgaacaggcatctccaccttcatgtgtccaaaggtgacttcccgaacttccgtaaacgcattcccccatgctcctgcccttctcagatgagggtgaccttgtgcttcctaggatatcactaaaatctcagcatgcttttaaaatgtaaaggataattacattgtttataagggttttaatttgtaatataaagaaaaaattacatgtttactcacaatgggtgaagaaattcatcattttaaaaattctttggaggtgtgggagaaaaatgttagaagacctcatccctgcctgatctgccctcccaggtcctctctgacctcatctgtttcccgtgtcctcctccctccctctgctccagccatgcaggcgtctttcctgttcctgggccgaggttgctcctgcctcaaggcgttcatgtgggctgtccctctgctggaactcgctggcccctcagctgcaggtgcaaacacccctccttccccaggtctctgttctgatatcaccttctcagtggggacttctgtgacccacctcccatttcacactccagctacaccctcaccccctcctctggtccatattggctgctctgcatgcttctttctgttttttcaccttccactgcctgtaggagtttatcgtccctggtacagtgggcagcagaggggaccatatttcctcagggtgaggtctcctttgtatgtttcattgtgttaacggagggggtgtgttgattctgagcaataaacaacatatttttaacattcaggattgacttctaaagactcttggtacgtgaggaagaaacccggaagaggaagaggaaagcaaaggagtcagggatggctctttctcaggtgagatgatatgttgggtggattgttctgtctccttcctctcagaaatcctgggccttggagttgggaatcttctctgagtctgaagcatcctgcctgacaggtttgctcgcactcacccatgccttccctcagtccctctcatctcgcttagattccatctcttgtgacacagtgacatcaacttgggaagaggccgcactgggcatggtcctgggaagggctcacaccgagacatggatggagatgggatgagggccccatggtgtcagtgctgttgggcagcagggattgttcaggggccacatctggatgcactgtcagctctctgtgaaccaggattagagcagctgccaatggaagtcatgtattcatgtgcacaaagtaggtggtaaattctagaaaaggtgaccaataaggggaaacgttttctgcctgattttatactacatttttagttttttgagtgagttactgtgtttctgactccaaaaatcttagtaattagaatggaaagttcatacacagacatgaatgatagaagatgttttattccatcatttctttaagaataggaaatcaacctgaatcatagcaggagattcattcaaccattcttagcacattaaagctcatggagactgtggggttactgcggagaggcttgtgaaacaggtgttttcaggaaaaatggttataatttttctcaaatatgggagcagtacttcatttttatcctagaggatggtgccatattctcattccacctattattatttttatattattataatattattatattttaaatatacaaagtcttgctttgtcgcccaggctgaagtgcagtggcatgatcttggctcacggcaacctccacctcccgggttcaagagattctcctgcctcagcctcccaagtatctgggattataggcacgcaccaccacacccggataatttagttgcatttttattagtgacgggctatcaccatgttggccaggctggtctcaaacttctgacctaaggtgatctgcctgcctcagcctcccagagtgctgggattacaggcatgagccgtgcccagccccaccaattattattaaatatatatttttatatgtaaacatcacatgatatatttatttgttttctggtaaaactcgaaggaaagctgcagcttagacccattgccataaagcatctcttttccctgtcacgtcctccaccctccttccagcctcattgtggagccgctactgtcagttctgtgccatgggtcagagcaaatctcgcgcgtctgtatttctgcatcgttacgagactttagaaaaaattctgcggtaaatttaaaaaatatatatttatggttttactttaggtttggggcgccatgttcaggtttgttacataggtaaagtagggtcatcagggtttgttgtacagattatttcatcactctgctattaatccccgtatccaatagttatttatttatttatttattttttgagactgagttttgctcttgttgcccacgctggagtataatggcatgatctcggctcactgcaaccactgcctcccaggttcaggcgattctcctgcctcagcgtcccgagtaggtgacattacaggtgcctgccaccactcctggctagtttttgtattcttactagagacagggtttcaccatgttggccaggctggtcttgaactcctgacctcaggttatccacccaccttggcctcccaaagtgctgggattgcaagcgtgatccaccgcgcccagcccccaatagttattttcttctagtcctctccttcctccccgcctccaccctcaagtagaccccaatgtctgttgttttcttctttgtgttccagtaaatattttactttgatatttgatcctactggttgtgaaaatttacatgttgtcatgttagttaacatggctagcttgccctttgacatctgcattagaaattgactggatgacctgtgtgttctttgcaatttttccctgtataaagagtgccatagtggctgcctctgtgcacacctgcgttactacagatacctgaagattcctccaggtcaggcggttgaaagggtgattgcttcttctaggatggggcattccctgttttcttagatctgacaagattcccccctgcccccacctgccaatgtatcctcttctaccaagatgtgattcttcttaagttaaacaaaacttgccactttttatatttttaaaacctttctatatatgcacacccacctacacaagtatacacacacacatgcatatacatacatatatacacacacgtatatattttgaacatcttttattttttgaatatctgggggaaatgacaatcctttgtattaacatctagttttttgtgagtctgtgtaggttttattattttgtggacatatgtatatataaaatggattttcatactttgagtcatctagttttcatgtattttcttttattttgagactgggtgtcactgtgctgccgaggctggagcacagtggcgcgatcttagctcactgcaacctccaccctcaggctcaaaccatccttctacctcaggctcccaagtagctggaaccacaggtgcctgccaccatgcccggctgattttttttttttgagatggagtctctgttacccaggctggagtgcaatggtgagatttaggatcactgcaacctctgcctcctgggatcaagcaattctgcgtcagcctcctgagtaactgggataacaggcatgtgccactgtgccaggctggattttagtttctgatcctgatctttcactgcggacgttgtcatctctgaagacatcactcataccctgtctcatctagatactgaatgtcacttgcattgtcagtaaaagtttctgggccaggcacggtggatcacgcctgtaatcctagcactttgagaggctgaggcaggcagatcatgaagtcaggagttttgagaccaacctggccaatatggtgaaaccccgtttctactaaaaatacaaaaattagctaagaatagtggtgcatgccaggaatcccagctcctcaggagactgaggcaggagaatcacttgatcctgggaggtggaggttgcagtgaactgagatggcacctttgcattccagcctgggtgacagagcgagactctgtctcaaaaagaaaaaaaaagtttctaacatttctgtaacgagaaccctacattgatttttattttattttatttattttattttattttattttattttattttattttattttgggatggagtttcactcttgttgcccatgctggagtgtaatggcacaatctcagctcaccacaacctccgcctccctgcttcaagcaattctccttccacagcctcccaggtagctgggattacaggcatgtgccacaacgcctggatgatttttgtattttttcttttttagtagaaacgggatttctccatgttggtcaggcaagtcttgaactcccgacttcaggtgatctgcctgcctcagcctcccaaaatgctgaaattataagcatgaggcactgtgcccggctcctgcattgatttcttttgtgtgtatttttagtattatccacaaacatcagaaattcatactgagagggtattgtgacctcttcaaaaggtataagaaggccggtgtggtggctcatgcctgtaatctcagcactttgcgaggccgaggcaggtggatcacgaggtcaggagttcgagatcagcctgaccaatatggtgaaactccgtctctactaaaaatacaaaaattagccaggcgcggtggcaccagcctgtaattccagctactcatgaggctgaggcaagagaattccttgaacctgggaggcagaggttgctgtgagccgatatcgtgccactgcactccggcctgggtgacagagcgagactccgtctcaaaaagaaaaaaaaaaagaagtgtaataaaacacaactcagaagacaaaatgtggtgaagaatcccttactcggatttgtcagaacattcactacaattaaatccatgctttcctctctcctcttctcatttcgtgtaaagataagaactcctcccataaccatttccttaaaatgtgttttcatttcagggtctattgacattcagggatgtggccatagaattctctcaggaagagtggaagtgcctggaccctgctcagaggactctatacagggacgtgatgctggagaattataggaacctggtctccctgggtgaggataacttccctccagaagtggggatgtgcccttgtgtatctttgtattttctcttttttttagatacaatgtcttgctctgtcacccagggtggagtgaaatggtgtgatcatgtcttactgcaatcttgaattcctgggctcatgtgattgtcccacctcagcctcccccagtagctggtacaggtgcatgccactatgccgggctacttttttagtttttttttttttttgtagttgttgtttttgtttttgtttacaaacaaggtcttcctgtgttgttgaagctggtcttggtctcctgggctcaagagatcctccttggcctcctgagtagctgggattacaggtgccaacccccatacctaattattggtttttattttttaaattgtagcatatgtgtgtccttagggtttatatgagttttctttggacaacatgtagttggttcctgttgattgagccagtctttgccttctgagtgcagagttaaatatttacatttgaagtattactgatggagaagaccttaccgttgtgtttctgtttcatgttatctgtatctcttgtaggtttttttggttattcatttctcatttattactttttgcgtttaattgcttttttgtgtagacatgctttgactcccttcttattgacttttgtttatgatggagtctcactctgtcgccaaggcagcagtgccgtatgtgatcttggctcaccgcagccggcttcgctctcgtgctcaaaaaattctcgtgccccagtggctcatgcctgtaatcccggcactttgggaggccgaggcaggcaaatcacctgaggtcaggagctcaaaaccagcctggctagcgtggcgaaattctgtctctactaaaaatacaaaaattagccagacacgatggtgggtgcctgtaatctcagttactcaggaggctgacacaggagagttgcttgaacccgggaggcggaggttgcagtgaaccaagatcatgccactgcactagagtctgagagacagagcgacactctgtctcaaaaaaatattttcatcacctgtgaaaactattctttctccactagaactctttgttctttatgttagaattatttctgtgtgtgttgcattttcaatatcacgtacagtgttttctcatgctgttttcctctaaataataggaaagttgtgttatgaagaaaaggtacacttatacaagtttctgtgtctatccttttatttgcttatttatttatttatttgacgaagttttgttctgttgcctaggctggagtgcaatggcacaatctcaggtcactgcaacctccgacttctgggtttaagtgattctcctgcctcagttttccgagtagctgggattacaggcctgtgccaccatgcctggctaattttgtatttttagtagagacagggtttctccttgttggtcagactggtctcgaacttctgccctcaggtggtgatccgcctgccttggcctcttaaagtgctgggattacaggtgtgaaccaccgcgcccagcttatctgtctttttatttacctttactggagaactttttgtatatttgtgggttggagttactctttagacttctttcatttctttctttcttttttttttttttctttcttgagaaggagtctgtctgttgcccaggctggagtgcagtggcgcagtcttggctaactccaacctttgcctcccaggttcaagtgattctcctgcctcagtctcccaagcagctgggactacaggcacatgccaccacacctggctgtttttttttttttttttctgtagagatggggtttcaccgtgttagccagaaaggtgctgaaaggatggtgctgatctcctgatcttgtgatcctcctgcctcagcctcccaaagtgctgagattacaggcatgaaccaccgtgcccagccagcctcacagtttttaaaacatgttattgttattagattggcttcaagtattgcaatagtacagtctctaaacttcctttgtttaataagatttgtcagccttcggtgatgttgatgatgagatgttcctgttcctgtctcagtcatttcactgtcctctcagaaatagcttagactggccagccaaggtggctcacacctctaatcccagcagtttgggaggcagaggtgagtggatcacttgaagtcaggagtttgaaaccagtctggccaacatggtgaaacatgaaatctactaaatacaaaaaattggccaagtgaccccacagactcacgcctgtaatcccagttctttgggatgctgagacgggcggatcacctgagttaaggagtttgaggccaccctggccaacgcggtgaaatcccgtctccactaaaaatacaaaaattagctgggcatggtggcgggcacctgttatcccaagtaactcgggaggctgaggcaggagaatcacttgaacccaggaggtggaggttgcagtgagccgacattgtgccacttcactccatcccgggtgacagagtgagactccaggctgaggtgggagaatctcttcaggcaggagaatcatgccactacactacagcctgggtgatagagcgtgactcaatctcaaaaacaaacaaaaaaggtagtagcttaaactgggaggcttacggcacagatatttatttctcatgaatttggaaagtgggaaatccaagagcaaggtgccagccacattggttcctggtgagagcattcttcatggtttagcccagccatcttcctgctgtgtcctgacatggtggaaagaggaacaggaaacgagctctttaatatctctttttataaaagcactagtcctattcatgagtagtcaacacccatgaccaaattctctcaaaggccccatctgcaggaacatcctattggagaataagaactttgaacctggcttttggccaataagaacattcagaccagggagcctgcatcatcttgttaatgtttttattgtgcaatttgttatatacaatgttttctctgatctcagtttataaattttcccagtacacattctatgttttatattagtgcatagtgaactagataactaaggccaatgcttatatatggaattgctgtattgcctggctgtttcataaatgtagttgtgacatcgtagttgcaccttctgacattgttagtcaatttttttttttttttttttttttttgtgagacagagtctcaccctgtcacccaggctggagtgcagtgatgcgatctcgtctcactgcaacctccaccgcctgggttcaaacgattctcctgcctcagcctcccgagtagttgggattacaggctcccgccaccatgcccagctaattttttttgcatttttagtagagttagggtttcaccatattggccaggctgctcttgaactcctgaccttgtatccacctgccttggactcccaaagtgctgggattacaggcatgaaccacagcgcccagccgttagtcacttcttattccttataatgctgtgtgtttttttgacctcgtacatcagaaggtaatgatcttaacatgtatttcagttcttatattgtatgctgctggtaagtagaaattgtggctttttttctgttttttgtttttgtttttgttttgagacagagtggcgcgatctcggctcactgcaagctccacctcctgggttgatgccattctcctgcctcagcctcctgagtagctgagactactgccacccgccatcacacccggctaattttttttttttatttttagtagagatggggtttcaccttgttagctaggatggtctcgatctcctgacctcatgatctgcccgcctcagcctcccaaagtgttgggattacaggcgtgaaccactgtgcccggctgtggcttttttcttaataggaaattgtttagaattctgcaggctgtataaatgtacttattatttgcttgctgattttatgggttacgttattttactaattaatttttatgattttacataaggcttttcggtatgtggtatgcaatataactgacacagtccactcgttaatgtcacaaagtgctgcctggcactatggctcacacttataatcccaggagtttgggaggctcaggcgcctaaattgcttgagtctaaagttcgaggccagcctgtccaacatggtgaaaccccatctttactaaaaacacaaaaattggccaagcatggtgatgcatgcctttaatcccagctactcaggaggctgaggcaggagaatggcttgaacccagcaggcggaggttacagtgagacaagactgggccattgcactccagcctgttgtgatggagtgagacttcatctcaaaaatataaaaatacaaacaatttcttaaaatgtcacaacttgccttttctgcatgaatataagtaattttataacagttattcagaaaaatattgtattaactttttaatttttttttcgagatggactcttgtcacccaggctgaagtacagtggtgcaatctcagctcactgcaacctctgcctcttgggctcaagcaattcttgtgcctcagcctcctgagtagctgggactacaggcatgggccaccacgccttgcttaattttgtaatgttttcttatcttctcagtgctatgattgtttgacaatacagaatttccattgattttggttatccttacatgagcttgttgtggattatttaccaatatagtatattgtgtggtcttttagcatttatttgtatatagtaaatatgctgtaaatatgaagaatatatgcttttctcctcattgatgtgacagtgatatgttttttgcaaagtcttatacactttagggtcacagtggaaaaatactccttactttaggcttatatacatttgtgtgctgtcagtgttttgacatgatattggaaataggcttccatagaaatgatttcaagtacatgtaatcgccctttatttattgatgaatcttacccttttgcgttcctaaactttcaagataatgtttgggaagtttaaaataagtattgtttttagtgtcacatttacacatttcagtattatttaccatctatacttaagtggaaacctattggtgtttatattttctagatatctcttccaaatgcatgatgaaggagttctcatcaacagcacaaggcaatacagaagtgatccacacagggacattgcaaagacatgaacgtcatcacattggagatttttgcttccaggaaatggagaaagatattcatgattttgagtttcagtggaaagaagatgaaagaaatagccatgaagcacccatgacagaaatcaaacagttgacgggtagtacaaaccgacatgatcaaaggcatgctggaaacaagcctattaaagatcagcttggatcaagctttcattcgcatctgcctgaactccacatgtttcagaccgaagggaaaattggtaatcaagttgagaagtctatcaacagtgcttcgttggtttcaacatcccaaagaatttcttgtaggcctaaaacccacatttctaagaactatgggaataatttcctgaattcttcattactcacacaaaagcaggaagtacacatgagagaaaaatctttccaatgtaatgagagtggcaaagcctttaattatagctcagtcttaaggaaacatcagataatccatttaggagcgaaacaatataaatgtgatgtgtgtggcaaggtctttaatcaaaagcgatatcttgcatgtcatcgtagatgtcacactggcaagaaaccttacaagtgtaatgattgtggcaagaccttcagtcaggagttaacccttacatgccatcatagacttcatactggagagaaacattacaagtgcagtgagtgtggcaagaccttcagtcgaaattcagcccttgtaattcataaggcaattcatactggagagaaatcttacaagtgtaatgaatgtggcaagaccttcagtcaaacgtcataccttgtgtaccatcgtagacttcatactggagagaaaccttacaaatgtgaagaatgtgacaaagctttcagtttcaaatcaaaccttgaaagacataggaaaattcatactggagagaaaccttacaagtgtaatgaatgcagcaggacctttagtcggaagtcatcccttacacgccatcgtagacttcatactggagagaaaccttataagtgtaatgattgtggcaagaccttcagtcagatgtcatcccttgtataccatcgtagacttcatactggagagaaaccttacaaatgtgaagaatgtgatgaagctttcagtttcaaatcgaaccttgaaagacataggagaattcatactggagagaaaccttacaagtgtaatgattgtggcaagaccttcagtcagacatcatcccttgtataccatcgtagacttcatactggagagaaaccttacaaatgtgaagaatgtgatgaagctttcagtttcaaatcaaaccttgaaagacataggataattcatactggagagaaactttacaagtgtaatgaatgtggcaagacctttagtcggaagtcatcccttacacgccattgtagacttcatactggagagaaaccttaccagtgtaatgagtgtggcaaagcctttcgtgggcagtcagcacttatttaccatcaagcaatccatggtatagggaaactttacaaatgtaatgattgtcaccaagtctttagtaatgctacaaccattgcaaatcattggagaatccataatgaagagagatcgtacaagtgtaatagatgtggcaaatttttcagacatcgttcataccttgcagttcattggcgaactcatagtggagagaaaccttacaaatgtgaagaatgtgatgaagctttcagtttcaaatcaaaccttcaaagacataggagaattcatactggagagaaaccttacaggtgtaatgaatgtggcaagacctttagtcggaagtcataccttacatgccatcgtagacttcatactggagagaaaccttacaagtgtaatgagtgtggcaagaccttcggtcgaaattcagcccttataattcacaaggcaattcatactggagagaaaccttacaagtgtaatgagtgtggcaaggccttcagtcagaagtcatcccttacatgccatcttagacttcatactggagagaaaccttacaaatgtgaagaatgtgacaaagttttcagtcgcaaatcaagccttgaaaaacacaggagaattcatactggagagaaaccatacaaatgtaaggtttgtgacaaagcttttgggcgtgattcacacctggcacaacatactagaattcacactggagagaaaccttacaagtgtaatgaatgtggcaagaacttccgtcacaattcagcccttgtaattcataaggcaattcatagtggagagaaaccttacaagtgtaatgagtgtggcaagaccttccgtcacaattcagcccttgaaattcataaggcaattcatactggagaaaaaccttacaagtgtagtgaatgtggcaaggtttttaatagaaaagcaaacctttcacgtcatcatagacttcatactggagagaaaccttacaagtgtaataaatgtggtaaggtttttaatcaacaagcacaccttgcatgtcatcatagaattcatactggagagaaaccttacaagtgtaatgagtgtggcaaaaccttccgtcacaattcagtccttgtaattcataagacaattcatactggagagaaaccttacaagtgtaatgaatgtggcaaggtttttaatcgaaaagcaaaacttgcacgtcatcatagaattcatactggaaagaaacattagaaatatgaagaatgtgacaaagtttacagttgtaaatcaagtcttgaaagacaggagaattcatactggagagaaagcttacaaatgtaagagtttgtgacaagaatcttgggcgtgattcacacctggcccaacaaactagaagtcacactggagagaaaccttacaagtgtactgagtgtggcaaagcctttagtgggcagtcaacacttattcaccatcaggcaatccatggtatagggaaactttactaatgtaatgattatcacaaagtcttcagtaacactacaaccgtttcaaatcattggagaatccataatgagagattttgaaagtgtaataaatgtggcaaatttttcagacattgttcataccttgcagttcatcggtgaactcatgctggagagaaaccttacaaatgtcatgattgtggcaaggtcttcagtctagcttcatcttatgcaaaacaggagacttcatacaggagacaaacttcacaagtatgatgattgcagcaaagcctttacttcacgttcacacctaattagacatcagagaatccatactggacagaaatcttacaaatgtcatcagtgtggcaaggtcttcagtctgagatcaccccttaaggaacatcagaaaattcatttttgagatgattgttccaaatgcaatgagtatagcaaaccatcaagcattaattggcattagagtcaattcagcattgacttgagtttgaattgacttaacattgagttcaagcattaattgacattaaagtgtttatgttaagaagattgggccaggcggggtggctcacgcctgtaatcccagcactttgggaggccaagaccaatagatcacttgaggtcaggagtttgagaccagactggccaacagacatgagtcacttttcccaccctgtattttgtttctttaataaaaactgttacgggtttttatgggtatctgttgaatctaaatcacatttgtttgtataatcattcaacaatattaagacttccaatccatcaatatgggttgtatgtctatttagtttttttgatcaatgtagatttcaaggtacaagcttctcacctccttaattcagtttatttgtaagtattaagtttcatagcaaattgaagtgtgttcataagtttctttaaacattatttattgttaatgtaaggaaattcaactaattttgggtgctgattttgtattctgcaaatacattgagtgggtttattagtatcagtaaaatcttggttgattctttgtgattttctttcttttttttttgagacagtctcactctgttacccaggctcttttctttttttttgagaaggagtctcactcttgtcacttggactggagtacaatggcacgatcttggctcactgcagcctctgcctttcgggtttaagtgattctcctgcctactaactgagattacaggtgcctgccaccatgtccgtataatttttttgtatttttagtagagacggggtttcaccatgttgaccaggtttttcttgaactcctgacttcaggtgatccgcccccatcagcatcccaaagttctgggattacaggtgtgagccaccgcacccagccagtgattttctatatagaatgtcgtatcatctacaaggaaataatttttttttttgagacaatgtctctctctgtcgccaggctagagtgccgtggaatgatctttgctcactgcaacctctgtctcccacgtccaagcaattctgtctcagcctcctgagtagctgggactacaggcgcatgtcaccacacctagctaatttatttattttttttattttagtaaagacggggtttcaccatgttggcccagatggtgggccaacatggtgagtaccttgaagagaacttgaaagaatatgttagatcgcctaacctcattatccgcccacttcggacttgcaaattgctgggattatgggtgtgagccatgagcccggccccaacaaatgtaattttacttctgtctttctgatttggatgagttttatttcttttgctatttaattgctctgcctaggacagccagtatttattgaatatcaggggtgagagcattcttgcatcatgtgatatcctacaggaaaaccattccattttccttcattggttatttcagctgtggtcatttcatggatgatttttatatttttgaggtaaaactctacctatattgtttaggatttttacgaagaatgaatattgagttctgtgaaatgctttttctctatctattgagataatgtgttttttatctgtcattctgtgcaagtgtgtatcccattgatttgagtatgttgaaccatccttgcatcccatgaataggtagcacttggatgtttacaatccctttttatatcctcttgaatacagtttgctagtataagggtcttcaagaagttcatggaaaaatacatattatgaaaaatttgtgcataaatttcacactttttgtaccaaaataaaccagtataaacttgttataacgtctgaacaggctctagtttgaggcactcagaaggataagacatcagtttgaaaagaacctctatcacagcaatacaaattctgttaaaacaagaagaaacatcaaatttacgatgagaccagacgcagtggctcaggcctgtaatcccagcggttttagaggcccaggcaggtgggtgacgtgagcctagggattcaagaccagcctgggcgacataggggacctcttctctgctaaaagtaaaaaaagtcagccaggtgtggtggtgcactgctgtggtcccagctactctgggcactgaagtgggaggatcagttgaagcagggattttgaggctgaagtgagccctgatctcaccactgcactccagcctgggtgacagagctagaccctgtctcaaacaagcaaataaatgagaggcataattcctcctttgagaataaaggaaaagatttcccttccttttgtctcttttctcaggacgtttatttagaaaatttgtaaatgaggccgggcgtggtggctcacgcctgtaatcccagcactttgggaggctaaggtgggcggatcacgaggtcaggagatcgagaccatcctggctaacacggtgaaaccccgtctctactaaaaatacaaaaaattagctgggcgaggtggcaggcacctgtagtcccagctactcgggaggttgaggcaggagaatggcgtgaacccaggggggcggaacctgcagtgagccgagatcgcaccactgcactccagcctgggtgacagcgagactctgtctcaaaaaaaaaaaaaaaaaaaaaagaaaatttgtaaatgtattttctctgtcttcagaagtggtattttttagaaacaataaaacttgttttcatcttagtggtgatccaggggtgtttttctaaaggacttgggagttctgtctttgaaatgccaacaacaaaaaagatagtacatctatctcagtagtaaattaagtaattcaaaatgaagctgggtgcggtgcctcacgcactttgggacagtgaggcaggtggatcacctgaggtcaggagttcgagaccagcatgaccaacgtggtaaaaccccatctctgagatacaaaggaggttgcagtgagtggaggttgcaccactgcactccagcctgggcaacaagagtgaaactacttctcaaaaaaaaagaaaaaaaaatcaagtaattccaatttaaagctgttggacctttaaataatcctactttttttttttttttgagatggggtacccctctgcatcacaggctggagtgtggtggcctaatgtcagctcactgcaacctccacctcccgggttcaagtgaatctcctgcctcagcctccggagtagctggtattacaggcatgtgccaccacgcccaactaatttctgtatctctagaagagatgggattttgccatgttggtcagcttggtctccaactccagacctgaagaaagtgatccgtctaccttgacctcccaaagtgctgggattacaggcatgagccactgcctccagcctcttcttttttttttttttgagatggagtttctcttgttgcccaggctgaagtgaaatgatgctatctcagctcactgcaatttctgcttcccaggttcaagcaattatcctacctcagcctaaacctaccaaaatcaaaatggctaggagagtgacctgtggtcgtcctcactgctacacccccaccagctccatgacagtttaaaaatgccatggcaacgtcagaaagctacgctataaggtctgaagaggggaagcatgaataattcaccccttgtttagtagatcattaagaacctcactcatccctggcctgcgtactctgtcccgcatcccaggcggtggccctagggaagtctccggagctgagcacagggtggactctccctcccgagtgaatgaggaatagggagaggatttctactctgttctgtgggccttcagcataaaattgctctttccacccaggcagagatttgcattttacattctagtttgcatccccgtttcaggcaattccagggcttttgaattatgcttcagcatcccgggcgggtctcgcctccaaaacctggaaaacacaggctgcagagcgaggcggagcaaattgtaggccccgccctgcccagcccagccccgccccgccccggggatccctaccccgcgggccacttatccacttccgtgccacgccccttgcccttcgcgccccgcccttcctcgcccgggccccgcccaccttatcagggttcctcccaggcctggctcctgtcctgcgcagattcgcacagacacggcagcggatcacctcagtgaaggtcacactgcagcgcctgagtttggctctgtctctagttaagtcggcccttcgcaggcccctggctctgctatacttgggacgtggggtccccagagacctggaaattcccacccccttttctccaaatagagcatattgagacttccctgtgagggtctgcaggtcgcttccttttggggttttttttgcagagacagagtctcactctgtcgcccaggctagagtgcggtggcgcaatcttggctcaccatgacctctgcagcccaggttcaagcaattctcctgcctcagcctcctgagtagccaggactacaggcacctgccaccgtgcctggataatttttgtagtttttggtatagacagggtttcaccatcttggccaggctggtcttgaactccttgtcaggcctctgagcccaagctaagccatcgtatcccctgtgacctgcacgtgtacatccagatggcctgaagcaactgaagatccacaaaaaagtgaaaataaccggttcctgccttaactgatgacattaccttgtgacattccttctcctggacaatgagtcttagaagctccccactgagtaaaaggatattaaccccagaggcaacaaaagaaattaaattagtggaagaaaaaattcagtcagcacaaataaatagatcccttagtctcactccaacttttgatttttgctactgcacattctccaacaggcatcattgttcaaaatactgatcttgtggagtggtcattccttcctcacagtacaattaagacttttacattgtacgtggatcaaatagctacattaattggtcagaaaaggttatgaatagtaaaattgtgtggaaatgacccagacaaaatagttgttcctttaaacaaggaacaggttagacaagcctttatcaattctggtgcatggcagattggtcttactaattttgtgggaattattgataatcattacccgaaaacaaaaatcttccagtttttaaaattgactacttggattctacctaaaattaccagacataaacctttagaaaatgctctgacagtgtttactgatggttccagcaatagaaaagcagcttacacagggccaaaagagcgagtcatcaaaactcaatatcaattggctcaaagagcagagttggttgcagtcattacagtgttacaagactttgatcaacctattaatattgtatcagattctgcatatgtagtgcaggctacaaaggatgttgagacagctctaattaaatatagcatagatgatcagttaaaccagcagttcaatttattacaacaaactgtaaaaaaaaaagaaatttcccattttatgttactcatattcgaggacacactaatttaccagggcctttaactaaagcaaatgaacaagctgacttactggtaccatctgcattcataaaagcacaagaacttcatgctttcactcatgtaaatgcagcaggattaaaaaacaaatttcatgttgtagggtccagccccatagggtcggtgggtctctccccatgtgcagagatgagagagtgtagaaataaagacacaagacaaagagataaaagaaaaggcagctgggcccgggggaccactaccaccaatgcacggagaccggtagtggccccaaatgtcgggctgcgctgttatttattggatacaaagcaaaaggggcagggtaaagcgtgtaagtcatctccagtgataggtaaggtcacgtgggtcacgtgtccactggacagggggcccttccctgcctggcagccgaggcagagagagagaggagacaaagagaaagacagcttacaccattatttttgcatatcagagacttttagtactttcactaatttactactgctttctagaaggcagagccaggtgtacaggatggaacatgaaggcggactaggagcatgaccaccgaagcacagcatcacagggagacggttaggcctccggataactgcgggcgagcctgactgatgtcaggccctccacaagaggtggaggagcagagtcttctctaaactcccccggggaaagggagactcccttccccagtctgctaagtagcgggtgttttcccttgacacttatgctaccgctagaccacggtccgcctggcaacgggcgtcttcccagacgctggcgtcaccactagaccaaggagccctctggtggccctgtccgggcataacagaaggctcgcactcttgtcttctggtcacttctcactgtgtcccctcagctcctatctctgtatggcctggcttttcctaggttatgattatagagcgaggattattataatattggaataaagagtaattgctacaaactaatgattaatgatattcatatataatcatgtctatgatctagatctggtataactattcttgttttatattttattatactggaacagctcgtgtccttgctctcttgcctcagcgcctgggtggcttgccgcccacagatgtcacatggaaacaggcaaaaaatattctacaacatggtacccagtgtcaagtcctacacctgcccactcaagaggcaggagttaatcccagaggtctgtgtcctaatgcattatggcaaatggatgtcacacatgtaccttcatttggaagattatgatgtgtccgtgtaacagttgatacttattcacatttcatgtgggcaacttgccagacaggagaaagtacttcccatgtgaaaaaacatttattgtcttgttttgctgtcatgggagttccagaaaaaatcaaaactgacaatggaccaggatattgtagtaaagctttccaaaaattcttaaatcagtggaaaattacacacacaacaggaattccctataattctcaaggacaggccatagttaaaaaaaactaatagaacactcaaaactcaattagttaaagagaagggggagacagtaaggagtgtaccactcctcagatgcaacttaatctagcattctatactttaaatgttttaaacatgtatagaaatcagactactacctctgcagaacatcttactggtcaaaagaacagcccacatgaaggaaaactgatttgataaaaagacaacaacaataagacatgagaaatagggaaggtggtaacttgggggagaggttttgcttgtgtttcaccaggagaaaatcagcttcctgtttagatacccactagacatttaaagttctacaatgaacccatcagagatgcaaagaaaagcacctccacggagatggaaacaccacaatcaaacaccatcgattcacaaggtgaacaaaatggtgatgtcagaagaacagatgaagttgccatccaccaagaaagcagagccgccgacttgggcacaattaaagaagctgacacagttaccaaaaaaaagcctagagaacacaaaggtgacacaaactccagagaacacgctgcttgcagctttgatgattgtatcaacggtggtaagtctccccttgcctgcaggggcagctgcagctaattatacctactgggcctatgtgcctttcccgcccttaattcgggcagtcacatggatggataatcctattgaagtatatgttaataatagtgcatgggtacctggccccacagatgatcgttgccctgccaaacctgaggaagaaggaatgatgataaatatttccactgggtatcgttatcctcctatttgcctagggagagcaccagcatgtttaatgcctgcaatccaaaattggttggtagaagtacctactgtcggtaccaccagtagattcacttatcacacggtaagtggaatgtctctcaggccacaggtaaattatttacaggacttttcttatcaatgatcattacaatttaggcctaaacaaaagccttgccccaaggtaattcccaaagaatcaaaaggcacagaagttttagtttgggaagaatgtgtggccgatagtgcggagatattacaaaacaatgaattcggaactattatagattggacatgtcgaggtcaattctaccacaattgcacaggacaaactcagtcatgtcccagtgcacaagtgagtccagctgttaacagtgacttaacagaaagtttagacaaacataagcacaaaaaattacagtctttctaccctttggaatggggagaaaaaggaatctctactccaagactaaaaataataagtcttgtttctggtcctgaacatccacaattatggatgcttactgtggcctcatattgcattagaatttgatctggaaatcaagctatataaagaagagatcgcaagccattttatactatcgacctaaattccagtctaacagttcctttgcaaagttgtataaagcccccttatatgctagttgtaggaaatatagttattaaaccagactcccaaactataacctgtgaaaactgcagattgtttacttgcattgattcgacttttaattggcagcaccatattctgctagtgagagcaagagaaggcgtgtgggtccctgtgtccatggactgaccgtgggaggcctcgccatccgtccatattttgactgaagtattcaaagccattttaaatagatccaaaatattctttaattgcagtgattatgggactaattgcagtcacagctacggcctctgtggcaggagtttcattgtactcttctgctcagacagtaaacttttttaattattggcaaaagaattctacaagattgtggaattcataatctggtattgatcaaaaattggcaaatcaaattaatgaccttagacacaatgttgtttggatgggagataggctcacgagcttgaaacatcatttctggttacactgtgactggaatatgtcacatttttgtattacatcctaagcctataatgagtctgagcatcattgggacatggttagatgccatctacaaggaagagaagatgatcttactttagacatttcaaaattaaaagaaaaatttttgaggcatcaaaaacccatttaaatttggtgccaggaactgaggcaatcgcgaaagctgctgatggcctcgcaaatcttaacccggtcacttgggttaaaaccatcgcaagttccactattgtaaatttcatattaatccttgtgttcctgttctgtctgttgttagtctgcaggtgtacccagcagctccgaagagacagcgaccattgagaatgggtgatgacgacgatggtggttttgtcaaaaagaaaagggggaaatgtggggaaaagaaagagagatcagactgttactgtgtctatgtagaaaaggaagacataagaaactccattttgatctgtattaagaaaaattgttctgctttgcgatgctgttaatctgtaactttagccccaaccctgtgctcacagaaacatgtgctgtattgaatcaaggtttaatggatttagggctgtgcagggtgtgccttgttaacaatatgtttgcaggcagtatgcccggtaaaagttatcgccattctccattctctgttaaccagggacacaatgcactgcggaaagccgcagggacctctgccctagaaagcctgggtattgtccaagtttccccccactgagacagcctgagatatggcctcatgggaaaagaaagaccttatatcccccaacccgacacccgtgaagggtctgtgctgaggaggagtagtgaaagagggaggcctctttgcagtcaagataagaggaaggcttctgtctcctgctcatttctgggaatggaatgcctcggtgtaaagccgaccattcattctattctgaggtaggagaaaaccgccctgtggttggaggtgagacatgctggcagcaatactgctctgtgactctttgctacactgagatgtttgtgtgaagagaaacataaatctagcctacgtgcacatccaggcacagtacctttccttgaacttattcatgacacagattcctttgctcacgtttccctgctgaccttctcgccaccatcaccctgttgccctgccacactcccctcacaaagatagtaaaaatagtgatcaataaatactgagggaactcagagaccagcgccggtgcgggtactcgcacactgagctccggttgtctgggcccactgctgtttctctatactttgtctctgtgtcttatttcttttctcagtttctcatctccacctgatgagaaacacccgcaggtgtggaggggcaggcccccttcaggctgaggcaggggaatcacttgaacccaggaagcagaggcttgcagtgagtcgagatcccaccactgcactgcagcctggatgacagagaaatactctgtctcaaaacaaaagaaaagaaataagtaaatacataaaagaaagtaacagatctcttccacaaatgtggaatggacaactaactggatatccacatggaaaagaacaatgttggatccctatctcatacaatcaacctcttattttaaaacgtaaaaaaaaaacaacgaaaaataaagagagaaagagagaaacgaggaagggagccctgcgggagggggtgttactttgtcgcccaggctggcctggacccccaggttcagcgatcctcccgccctgcttcctgagtagatgggacctcaggctcccgcgcccgcgtccgcatccttgctgtgtttatccggcaggtggtgacctcactcctcgctggcctgagcactccgtccagcatcccaggcggtggctttagggaagtctctgcagctgagcacagggtggactctccctccggagtgaatggagaatagaaagggagaggatttctattctattctctgggccgtcagcatgacattgtaagttctgcccaagcagggctttgcatttcacattctactttgcatccgcgtttcagacaattccagggcttttgaatcatggatcggccttcctggccatctcgcctccaaaacccaaaaacagaggcggtgggagggaggctgagagacgcacagatcccgccccagcccagccccgccccgccctctgccggtactaaagggcaaggtctctccgcctctacccctacctggcccaggccccgcccacctcctcgcaggccccgcccaggcctggcttctgtccttccccgctcagacgcgcgcaaacccggaagcagatcgcgtggagtgaaggtccctcagcggcgcgtgagtttcgctccatcttgtatgaagtctgctcttcccaggtccccggcgcttctgtccctgggacgtggggtccctacagacctggaaattctcacccgtcttccttcgcccagagcaaattgagacgtccccgtgagagcccgggggtcacttccttttgggtttaaagtctccctgaggctggtcccgttccggatctttctgctatagggcaatatatacactttctatcgcgtagttttcctgctctaaacctttttctgactcctcccgccccgcgctttttaaagtcctcacccgagaggtgaattcccgccctgggcgcctcccagcctcgccctcgtcggcccctagagcgcagcgtcgcagctccggtcccggggaggccgagttctctgcctgtcctgggatcctacaaaccccacccttgtcttaaggcgccgtcgccccccacgtccctcctcatgccgggccctgctgctccccaggtctcccatccgcagtcacagcttgccctgagcctgcgttaggggaggtgcccgggttctgtcctgtgacacggggtgttcttgcctgcccagttccagcccctggaaaataagctcctccgggatgcaggcgtcttactccaaaccctcctgtgattgtgtgggccaaagggatcgggagacagacagcagtagaaaacctgagacagagaaaagaagaatgagaaaggcccataacagatggcaaagtagaggatgggtgagggatttgccaagagacagcaaaagtgaaaaaaaaaaaaaaaaagataagcaggaggagaaaagcaactagagaaatgtagagaaaagctagatgtacagagagatgaaggacagcaaggtagggagagggacagcaaagagggaggctcatcagggtgagggagaggaggagggatttggagccagggcagacagagcagagtggtgctggtggcaaagagaacagagggagaaccacagcagggaggacacctggggatctggggtgccagagagtggggacagggggtataacagagaagagagaatttaacggggagagcagaggaggcgcagagatggtgttgcgggaaactgaggactagagagactgatatgggggagacaggaggatgtttatttaaggtacacagcggctcagcagatttacatctaaaaagctgagcatttcaacaaacacagagtgggttttttttgctttcagaagcagagtagaagcagttaatcatataataggtcacgtaatctatagcatagcataacttgtgtccttccatagctggtggccttgtagctgcattgaaagaaaaacaagaacagctaaatacacacgtttgtcctttttttttccttcacccttgttctggaggtgggggtgtcaggagctcattcctttggcttcaacttctcaaacagcgtctcataactgttcttgaagtgagcttgctaggcagaggaaaacttcttttctttttaacccttgccttgcctgttactattcttggagtgaatgaatacatttttttttttaaatttctgcttcagtttcttcccttagatgctttttattatcaagattttaatagaaagcatcactattactggattcttcatgaaagagcaggttttcttctttaggcacaggctgatatttatacagagctattagctgagtggtagtctgcctggttacaattgcttctatagttgattaaatgttcttaacaaggagaggtaagaggtaagggagtattaaaccaattcttagtatttctagaactactcctattaaggttttgaatcgactgaaggaggaaaaccagcctctaaagagggactcgggagtctactttgtctaagtctggactggaacatgggataattttttcatacttgcagttatttctataacagccttcctgttgtcattgatttctaggcagcaattagttagattaaactttctacatactcctccttcctaggctaggaggtagtctaaagctaatctattttggtagatggcatttctcattttcatggcttactgggccagtttcattagtgatgatttcaagtactgcttgcaaatttatgatgtggttaagcgtgtaaatcggggtgcgatacctttatgacttatctcgtgcccaggtagctggcctagagtacagaattagtctttcagggggccagtctgtatctttctaatcttctatttttatgtcttttcttatgtctatatctcttttgttttttttctttaattttgttgtagacaggataccttaaaatttctccttgttgcaatgggagttagaagaaagatggtctgattgtttcaagtacacaagcccttgtccatttggctggcaactgtcagtaggcctgtggcacacagttctaatagagaccagagggtgcttgccaggtatttggagcttcaagctgatactatgtgtggtttagagaagagaaacgggagaatgagtttggatgaggtgatctggagtcatctttgccttgccacaaagttttctttagtgttttattataatattgctgtcttaaacaagttaattcttctagtgactctgtaaaagcttttccttagtgagcaacacagtatctcctgataatagaagtttttaagagctaggggcttgaaactgtgggcattgctttgggggaagagtcagttagagttaaattatcttgtggcattaacgcttttgcttcttaaggccagtggtctcctatgttagtccttctacaaacataacatgaggaaatgcttaggctgctagcaatgttttcagctagccaagcaaacaggcttttagctaaaggaggaggctctggtaacttctggtctacctgcttgtagaataatttaaagatttggaattgttgctgggccagaagggtcggggttccttttttgataacatataggtaggttgctgggtaggtgtgtgtggagacatgaatggggtaacctgcggtccacacgggtaagtctggctttagaatggtgaaatttacgggatgacagatttttgtttcacaatctggttttaccggcattttggtaagcatgattgtcctttgttgtgtgctggggtgccacgatatgcaatactgagaatctttttctggggtctcagaaggacaaggtggcatgcatacgtatctgtagtcatttctatagtatctttttataggtaggttaccatagacagatgagtctaggtctgctgatgacaagcatcaaaatacagagaaataggccctcggtaaaagggaaggaccttggtttggtttaaaagggaacttttttttgaccttgcatgaattttaaactattcaccaggtgaaaacttggagttataagatacataaggttggttattttcttggtcacaaattgagtagattgtctatgtacaagttctttttttttttgagctggagttttgctcttgttgcccaggctggagtgcaatggcacaatcttggcccactgcaacctccacctcccaggttcaagtgatcctcctgcctcagcctctcaggcacccaccaccatgcccagctaattttttgtatttttagtagagacgggtttcaccatgttggccaggttggtctcaaactcctgaactcaggtgatccacctgccttaacctcctaaagtactgggattacaagcatgatccattgttcccggccacccatgtattcttgatggaaacaatttgcttatgtcttagttctacagctgaccttcttttcactgtttttaaggtcaatagctgtgggttcgcacttctgcattttataaatgttactgtgattttcttgtaaggaagaattaaacgtcgggaaccaaaggcaacagaaccttgcaaaagaagtttctttttttttttttttttttttttttttttgagacggagtctcgctgtcacccaggctggagtgcagtggcgcgatctgggctcactgcaagctccacctcccgggttcacgccattctcctgcctcagcctccccagtagctgggactacaggcgcccgccaccacgcccagctaattttttgtatttttagtagaggtggggtttcaccgtgttagccaggatggtctcgatctcctgacctcgtgatccgcccgcctcggcctcccaaagtgctgggattacaggcgtgagccaccgcgcccggccaagaagtttctttagcccagatatgtgaaagatacctctctaattttcaaggataggggtgataaagaccaacacttccattagctcttccaggcccccatgtaataattcaggtagctgggtgcggtggcccacgcctgtaatcctagcactttgggaggctgaggcgggcagatcaggaggtcaggagatcgagattatcctggctaacttggtgaaaccccttctctactaaaaatacaaaaaattagccagatgttgggtggatgcctgtagtcccagctactcgaaaggctgaggcaggagaatggtgtgaacgtgggaagcggagtttgcaccgagatcctgccactgctctccagcctgggagacagagcgagactccatgtcaaaaaaaaaaaaaaaaaagaacaggcacaccttctcactcatctcagaccttctcagggtaacttggtgaaaatttccctgctctgagcccagtgagcctccctgcaacttggagatgaggggctagaccagaaaagctcaacccgagtgaccctggccccttaaatggttggcaaaatagaatgcatgtctgggtgtggcttttcttctgggagaggggagtgcccagttgtaattagaattttaaatgggatgcagtaccccaaaaatgaaaaaaaaataataaaatgcagaagaatggaagaaacagagttgcagactcagacacagagactatcttcggggcctttctctgtatgaggacatcacagccaaatctaaagcaggtcacgtcagtccctggcagggaaccctccaccggcttcccgtgttccccaggacaaaagcccaactcctcactgtggctccacagccctgtgtccagggcccctgccagtgtccagcctcctcctgggagcttgccctcatctcatgactccctttgccccagtcacatttgcttttcgcttttcccaaacatcagaacctttcctgtctcaggtcgttgtccctgctcttaacctatgtccctaaatgatgacagccctgtccctttcctctgcgttcaggtctaggctcagagctgtctcccatgccctccaccccatctgaagttccctctgcccatcagtctctatcacatgactcaggttttattatctctgcatcaatcacatcagaaacgcttttttttttttttttttagacagagtctcactctgtcgcacaggctgtgagtgcagtctcatgatcttggctcactgcaacctacgtctcctgggctcaagcgattcttgtgtctcagcctcccaattagctgagattacaggtgtgtgccaccacactcagctaattattgtatttttatttttagtttagttttgagtctcattctgtcacccaggctggagtgcagtgacatgatctcggctcactgcaaccaccacctccagggttcaagcgattctcctgcctcagtctcccgagtaactgggattacagacacctaccaagcccagttactttttgtatttttaatagagacaaggtttcaccatgttgaccatgctggtctcagacttctgacctcaagtaatccacccaccttggccttccagagtgctagtattacaggcgtgagccactgtgactggctcaatttttgtatttttagtaaaggcagggtttcactatgttggccaggctggtctcgaactcctgagctcaagtgattctcccacctcaacctcctaagtagctgggagcacagacacacagacatgcaccgctatgcctggctaagtttttatatttttggtagagatggggtttcaccatgttgcctaggctggtctcaaactcctgagctcaagcgatctacccctctcagcctcccacagtgctgggatgacagctgtgagccactgcacccagcctctgtatgaagtttggtcaggtctgggtcggtgccctgaagagctcattccagcccagctccccactgctgcagcgtgtgtgtaggcttccccaggaggggagtgggagttttcctgtaggagtttattgtacctggtacctggtgtggagggcagtagaggggactgtatttcatcagggtgaggtctcctttgtatgtgtcattgtgttacagggagggtgtgtgttgattctgagcaataaacaacatatttttatcactcaggattgacatctaaagactcttggtacatgaggaagaaacccggaaaaggaaagcagaggagtcagggatggctcttcctcaggtgagacgatattctcagtggattgttctgtctccttcctttcagaaatgctgaccttggagttgggaatcttctaagtctgaagcttcctgcctgacaggtttgctcacattcacccatgccttccctcagtccctctcatctcacttagattttatctcttgtggctcagtgacatgaacttgggaagaggctgcactgggcatggtcttgggaagggctcacaaccagacatggatggagacggggtgagggtcccgtggtgtcagtgctgttgggcagcagggattgttcaggggccacatctggatgcactgtcagctctctgtggaccaggattagagcagctgccactggaagtcacgcactaatgtgcacaaagtacgtggtaaattccagaaaaggagaccaatattgggaaatcctttctgcctgattttatactatatttttaggtaattgaatgggttgctgtgtttctgactccaaaatcttagtaattagaatggaaagttcatacacagacatgaatgatacaagatgtttgattccatctttattttaagaatatgaaatcaacctaaataatagcaggagattcattaatccatttgcagcatattaagctcatggagaccgtggtgttactgtggagaggcttgtgaaacaggtgttttcagtaaaaatggttataacttttctcacatatgagagcagtacttcatttttatcctagaggatggagccatattctcattccacctgttacaattattattattatgatattctgataatattattatattttaaatataagaagtctttctctgtcacccaggctgaagtgcagtggcatgatcttggctcatggcaacctccacctcccaggttcaagcgattctcctgcttcagcctccccagtagctgagattataggcatgcaccaccatgccaagctaattttgttgtatttttattagtgacaagtatcaccatgttggccaggctagtctcaaactcttaacctcaggtgatctgcctgcctcagcctccaggagtgctgagattacaggcatgagccaccatgcccagccccatcaattattattaaatatatatgtttatatttaaacatcacatgatgaatatatttgttttgtggtaaaactccaagcaaagctgcagcttataccctttgccataaagcatcttcttttctctgtcgtgtcctccaccctccttccagcctcactggggagccgctactgtcagttcggtgtcaggtgtcaggtgtggtactcatgtatttctgtatcgttatgagactccggaaaaattctgcagtaaattacaaaattttttttttacaaaaattaaccaggcatggtggcgcatgcctgtaatcccagctactcaggaggctgaggcaagagaatgacttgaacctgggaagcggaggttgcagtgagatgagattgtgccactgcactccagcctgggcacagagcaagacttcgtctcaaaaaaaaaaaaatagtttttatatttatgtttttactttaggtttggggctgcatgtgcaggtttgttacataggtaaactagggtcatcagggtttgttgtacaaattatttcatcactctggtattaagcccaactgcaacctctgcatcccgagctcaagcgattctcctgcctcagcctcctgggtagctgaaattactggggcctgctaccacacctggctaatttttgtatttttagtagagatagggtttcaccatgttagccaggctgatcttgaacttctgacctaagatgatccacacacctcggcctcccaaacagctgggattacaggtgtgagcctccttgcccagcccccaatagttattttttctgctcctctccttcctcccactctccccactctcaagcagacctcagtgtgttttgttttcttctttgtgttccaggaaatattttaccttgatatttcatcctgctagttgtgaatttacatgttgtcatgttagtgaacatggctagcttgctctttgacatctgcgttggaaattagctgaatgacaacatgtgggtcctttgtgatttttccctgtataaagagtgccatagtggctgcctctgcacgtgcctgcattcctacagatatctgaaatttcctccaggtcaggcagttgaaagggtgattgcttcttctaggatggggcatttcctgttttcttagatctgacaagattcctccctgcccccaaccgccaaagtgtccttttccagcaagatgagattcctcttcagttatacaaaacttgctattttatatttttacaacctgtatttatatatacatacacacacacatatacatatacatacgtatagacacacacaaatgtatatattttgaacaacttttacattttgaaaatctggggaaaatgacaaccctttgtattaacatctagtttttttgtgagtctgtgtaggtctcattattttgttgacaaatatatctatataatggattttcctactttgagtaatctagttttcatgtattttcttttattttgagactgggtctcactgtgttgcccaggctggagcacagtggtgtgatcttagctcactgtaacctccaccctcaggctcaagccatcctcctccgtcaggctcccaagtagctggaaccacaggtgcctgccaccatgcccagctaatttttttttttttgagatggagtctctgttgccctggctggattggtgcaattttggatcattgcaacttctgcctactgggatcaagcagttctgcatcaccctcctgggtagctgggataacaggcatgtgccaccgtgcctggctggattttagtttctgatctttcactgtggacgttgtaatctctgaagacatcactcatactctgtctcatctagatactgaatgtcacttagtgtgtcaacaaaagtttctgcgccaggcagggcccagaattgggcctgcaattccagcactttgagagactgtatcaggcagatcacgaggtcaggagtctgagacaaacctggccagtatggtgaaactccgtttctactaaaaatacaaaaattaaattggcgtggtggcatgcacctgtaatttcaactactcaggaggctaaggcaggagaatcgcttgatcctgggaggtggaggttgcagtgagcggagactatgccattgcactccagcctgagtgacagagtgagactctgtctcaaaaaaaataaaagtataacaaaacacaactgggaagacaaaatgcagtgaaaaaccccttactcggatttgtcagaacattcactgcaattaaatccatgctttcccctctctcctcttctcattttctgtaaagataagaactcctcccataaccatttggttaaaatgtgttttcatttcagggtctattgacattcagggatgtggccatagaattctctcaggaggagtggaaatgcctggaccctgctcagaggactctatacagggacgtgatgctggagaattataggaacctggtctccctgggtgaggataacttccctccagaagtggggatgtgtcctttcgtatctttgtattttctctttttttagatagagtatctctctctctgtccccaagggtggggtgcaatggtgtgatcatggctcactgcaatcttgaattcctgggctcaagtgattgtcccacctcagcctcccctcgtagtggtacaggtgcatgccaccatgccaggatacttttttagtttctttttttagagacaggttcttgctgtgcggttgaagttggtcttgatctcctgggctcaagacatcctcctcggcctcccaagaagctgggattacaggcgccaacccccgtacctaactattggcttttgtttttaaactttttgcatatgtgtgtccttagggctaatatgagtcttctgtggacaacaagtagttggttcctgttgattgagtcagtctttgccttctgagtgcagagttaaatatttgcatttgaaatattactgatgcagaagaccttaccattgcctttttgttacatattatctgtatttcttgattttttttgttgttattttgttcttattttgttttttcaggtttgttttttgttcttcattctccatttcctgcttattgtgtttaattgcttttctgtgtagacacgctttgactcctttcttctttacttttgtttgtttgtttgtttatgatggagtctccctctgtggccaaggctgcagcgcagtggggcgatcttggctcaccgcagccggctccacatctcgggctcaaacaattcttgtgccccagtggctcatgcctgtaatcccagcactttggaaggccgggggtgggcaaatcacctgaggtcaggagttcaaaaccagcctgtctaacgtggtgaaactccgtctctactaaaaatacaaaattagccagacacggtcgtgggtgcctgtaatccctgctactcaagaggctaatgcaggagagtcacttgaaccctggaggtggaggttgtggtgacctgagattgtgccatgcactcccgcctgggcaacacagtgagactctgtctcaaagaaaaaaagattccacaacctgcaaaagcttctctttctccaccagaactttatttatgtcggaattatttctgtgtatgctgcattttcattaacatatatgtacagtgttttttcatgcttttttcttctaaataataggaaaaaaagttgaattatgaagggacacatataccagtttctgtatctgtccttttatttgcctatttatttatttattaatgagacgaagttttgttcttgtcacccatgctagagtgcaatggcacaatctcgggtcactgcaacctccaactcctgggttcaagcaattctcctgcctcagtttcccgagtagctgggattataggcatatgccaccatgcctggctaattttgtattttaatagacatgggatttctcctttttggtcaggcttttcttgaactcccgccctcaggtgatctgccaacctcggcctcctaatctgctggaattacaggtttgaaaaactgcgcccggcctatctgtctttttatttacctttactggagaattttatatatatttgtgggttggagttactcttaggcttctttcatttcttttttttttttttttgagatggagtctcggtctgtcactcaggctggagtgcagtggcacaatcttggctaactgcaacctctgcctcccaggttcaagcgattctcctgcctcagtttcccaagtagctgggactacaggcatgtgccaccacaccaggctaattttttgtatttttgttttttgtagagacggggtttcactgtgttagcaagaatggtctcgatctcctgacctcatgatcctcctccctcagcctcccaaagtgctgggattacaggtgtgaaccacctcactcagccggcctcaaagtttttaaaacatgttattgctattagatggcttcaagtattgcaaaatttatagtacaggccctaaacttcctttgtttaattagatttgtcagccttcagtgatgtgaatcatgagatgcttcttttcctgtctcagtcatttcactgtcctgtcagaaatagcttagactggccagctgaggtgggtcatgccttaatcccagcagtttgggatgctgaggtgggcagatagcttgaagtcaggagtttgagaccagtctggccaacatggtgaaacctcgaatctactaaatacaagaaattggctaggtgtagtggctcaagcctgtaatcccagcactttgggaggccgagaggggcggatcacctgagttaaggaatttgagaccagcctgaccaacatggtgaaaccctgtctctactaaaaatacaagaattagctgggcgtggtggcacatggctgttatcccaagtactcgagaggctgaggaaggagaatcttgaacccgggaggtggaggttgtagtgagccaaggttacaccactgcactccagtctgggcaccaaagtgagactacaggctgaggcgggagaatctcttgaggcaggagaatcgtgccactacactccagcctgggtgatagagcgtgactcggtctcaaaaacaaacaaaaaaagaaatagcttaaactgggaggcttaagacacagaaatttatttctcatgagtttggaaagtgggaaatccaagagcaaggtgccagccacattggttcctggtgagagccttcctcatggtttagcccagccatcttcctgccatgtcctgacatggtggaaacaggaacaggcaacgagctctttaatgtctctttttatgaaagcacaagtcctattcacgagtagtcaacacccgtgaccaaattgtctcaaaggccccatctgcaggaacatcctattggagaataagaactctgaacatggcgtttggccaatacaaacattcagaccagggagcctgcatcatcttatttatgtttttattgtttaatttgtttcatacaatgttttctctgatctcagtttataaattttcccagtacacattctatgttttatattttatgcatagtgaactagatacatagggcaatgtatatatatatatagaattgctgtattgcctggctgtttcataaatgtagttgtgacatcataattgcaccctccggcactattagtcaattctttttttttttcttagagacgaagtctcaccctgtcactcaagctggagtgcagtggtgggaccttggctcaccacaaactctacctcctgggttcaaacgattctcttgcctcagccttctgagtagctgagattacaggcacccgccaccacacccagctaatttttttgtatttttagtagagttatggtttcaccacgttggccaggctattcttgaactcctgacctcatggtcttcccacctcggcctcccaaagtgctggaattacaggcatgagccactgcacccggctgttagtgaattcttattcattataatgctgcatatttttttgacctcatacatcagaaggtagtgatcttaacatgtatttcagttcttatattgtgtgctggtggtaagtagaagttgtgcttttttcttaacagggaattgtttagaattctgcagtttgtataaatgtacttatgatttgcttgctggttttatgcgttacagttattttaccaattcatttttatgattttacataaagcttttcggtatgtggtatgcaatataactgacacagtttactagttaatgtcacaaagtgccagcgggtgctgtggctcacgcctgcaatcccaggactttgggaggctgaggcgggtggatcacttgaggtcaaaagttcaaggccagcctggccaatatgatgtaaccctatctctactaaaaatacaaaaattagccaagcatgctggcatgtgcctgtaatcccatgtactcaggaggctgaggcaggagaatggcttgaacccaaaaggtggaggttgcagtgagctgagatcaggccattgccctccagcctgttgtgacacagtgaaacattgtctcaaaaatacaaaaataaaaaaaaaattttaaatgttacaatatgccttttctgcatggatataggtaattttatgacagttattcagaaaaatatttttttttttttgagatggagtctcactttgtcatccaggctgaagtacagtggtgcgatctcggctcactgcaacctctgcctcttgggttcaagcaattcttgtacctcacccttgcgagtagctgggagtacagacgtgcaccaccatgccttgctaaattttgtaaacttttcttatcttctcagtgctatgattatttaacaatacagaatttccattgattttggttatccttacatgagcttgctgtggattatttaccagtatattatattgtgtggtcctttagtatttatttgtatacagtaagtatgctgtaaatatgaagaatatatacttttcattgatgtgacagtgatatgtcttttgcaaactgttagacactttagggtcacagtggaaaaatactccttattttaggcttacacatgtttgtgcccttcagtgttttgtcatgatattggaaataagctttcataataataatttgaagcacatgtaatcgccctttatttattaaagaatcttacgattttgtgttcctaaactttgaagatcatgtttgggaagtttaaaatcagtattgtcttttgtgtacctattagtgtttatattttgtaggtatctcttccaaatgcacaatgaaggagttctcatcaacagcacaaggcaatacagaagtgatccacacagggacattgcaaagacatgaacgtcatcacattggagatttttccttccaggaaattgagaaagatattcataactttgagtttcagtggcaagaagatgaaagaaatggccatgaagcacccatgacaaaaatcaaaaaattgatgggtagtacagagcaatatgatcacaggcatgctggaaacaagcctattaaatatcagcttggatcaagctttcattcacatctgtctgaactccacatatttcagcccaaagggaaaattaataatcaagtggagaagtctatcaacgatgcttcctcggtttcaacagcccaaagaatttcttgtaggcccaaaacccatatatctaataactatggggataattttctgaattattcattactcacacaaagacaggaagtacgcatgagagaaaaatctttccaatgtattgagagtggcaaagcctttaattatagctcactcttaaggaaacatcagattattcatctaggagagaaacaatataaatgtgatgtatgtgacaaggtctttattcggaagcgataccttgcacgccatcgtagatgtcacactggtgagaaaccttacaagtgtaatgagtgtggcaagtccttcagtcagatgtcatcccttacatatcatcatcgacttcatactggagagaaaccttacaaatgtgaagaatgtgacaaagctttcagacacaattcagcccttcaaagacataggagaattcatactggagagaaaccacataagtgtaatgagtgtggcaagacctttagtcagaagtcataccttgcatgccatcgtagcattcatactggaaagaaaccttacgaatgtgaagaatgtgacaaagctttcagtttcaaatcaaaccttgaaagtcataggataactcatactggagagaaaccatacaagtgtaatgattgtggcaagaccttcagtcatatgtcaacccttacatgccatcgtagacttcatactggagagaaaccttacaagtgtgaagaatgtgatgaagctttccgtttcaaatcaagtcttgaaagacataggagaattcataatggagagaaactgtacaaatgtaatgagtgtggcaagaccttcagtcaggagttatcccttacctgccattgtagacttcatagtggagagaaaccttgcaagtgtggagaatgtgacaaggcttacagtttcaaataaaatcttgaaatacgtcagaaaattcatactggagagaaatgttataagtgtaatgattgtggcaagatcttcagtcatacgtcatccattgtataccatcataaatttcatagtggagagaaaccttacaaatgtgaagaatgtgatgaagctttcagtttcaaatcaaaccttgaaagacataggagaattcacactggtgagaaaccttacaggtgtaataggtgtggcaagaccttcagtcatacatcatcccttacatgccatcatagacttcatactggagagaaaccttacaaatgtgaagaatgtgatgaaactttcagatacaaatcaaatcttgaaagacataggagaattcataatggagagaaaccgtacaagtgtaatgagtgtggcaagaccttcagtcagaagtcatgccttacacgccatcatagacttcatactggaaataaatcttataagtgtaatgagtgtggcaagaccttcagtaaggagttaacacatgccatcatagacgtcatactggagagaaaccttagaagtgcaatgagtgtggcaaaacctttcataggcagtcagcgcttatttaccatcaagcaatccatggcagagggaaactttacaaatgtaatgattgtcaccacgtcttcagtaatgctacaactattgcaaatcattggagaatccataataaagagagaccttacaagtgtgataaatgtgacaaatttttcagacatcgttcataccttgcagttcacgggcgaactcatgctggagagaaaccttacaaatgtgaagaatgtgataaagctttcagattcaaatcaaaccttgaaagtcataggagaattcatactagagagaaaccttacaagtgtaatgagtgtggtaagatgttcagtcaaaattcggcccttgtaattcataaggcaattcatactggagagaaaccttacaagtgtaatgaatgtggcaaggtttttaatcgcaaagcaaagcttgcatgtcatcatagacttcatactggagagaacgcttgcaagtgtaataaatgtggcgaggtttttaatcaacaagcacaccttgcacgtcatcatagaactcatactggagagaaacattacaagtgtaatgagtgtggcaagacctactctcacaattcagtccttgtaattcataagacaattcacactggggagaaaccttacaagtgtaatgagtgtggcaaaaccttccatcacaattcagtccttgtaattcataaaacaattcatactggagagaaacaagcgtaatgaatgtggcgaggttttcaatcaacaagcacacgttgcacgtcatcatagaattcatactggagagaaaccttagaaatgtgaagaatgtgacaaagtttacagtcgcaaatcaaacctcgaaagacaggagaattcatactggagagaaaccataaaaatgtaagagtttttgacaaggctttcggacgtgattcacacctggcacaacatcccagagttcacactggagagaaaccttacaagtgtaatgagtgtgtcaaagcctttagtgggcagtcaacacttattcaccatcaggcaatccgtagtgtagggaaacttgactaacgtaatgattctcacaacgtcttcagtaatgctacaaccattgtaaatcactggagaagccataatgaagagagatcttacaaatgtaataattgtggcaaatttttcagacatcgttcatacattgccgttcattggcgaactcatgctggagagaaatcttacaatgtcatgattgtggcaaggtcttcagtcaagcttcatcttttgcaaaacaggagaattcatacaggagagaaacctcacaagtgtgatgatcgtggcaaagcctttacttcacattctcacctcattagacatcagagaatccatactggacagaaatcttacaaatgtcatcagtgtggcaaggtcttcagtccgacttcactccttgcagaatatcagaaaattcatttttcaggtaattgttcccaatgcaatgaatatagcaaaccatcaagcattgattgacattagagtcagttcagcattgacttgagtttgagttgacttaacattgagttcaagccttaattgacattaaagtgtttatgttaagaggactgggctgtgtggcatggctcacgcctgtaatcccagcactttggtaggccaaggtgggtaaatcacttgaggtcaggagtttgagatcagcctggacaacagacctgagccacttttcccagcctgttttttgtttctttaacaaaaactgatagggatttttatgggtatcgtattgaatctagattacattgggttatataatcatttaacatattaatttttccaaaccatcaatatgggttgtgtctctatatatgtttttaatcattttgatcaatttttgttgatttcaaggtacaaacgtctcacctttttacgtttattcctaagtatttcttattttaagttctccagcaaatggaagtgtgttaaaattttcttttaaaattgtttattattaaaatatggaaattcaactaatttttggtgctgatactgtattgtgcaaatccactgaatatgtttgttagttccagtactattttggttgagtctgtgattttctacacagaaggtcatgtcgtctacaaacaaatgtaattttacttctttctttctgatttggatgagtttgatttcttttgctatttaattgctctggctaggacaggcagtattgattgaatagaaggggtgagagcattcttgcatcatgtgagatcgtacaggaaagcattccattttccctgcttggttatttactcatttgtcatttcatggatgttctttctattgttgaggtaaatttccttttctattttgtttaggatttctatgatgactggattttgaattttgtggaacgctttttctccatctactaaggtgatgtggttttaatctttcattctgttctagtggtatataacattgatttgcttgaatatgttgaaccatccttgcatcccagaaataactggcacttgaatatctacatttttttaatatcctcttgaatacagttttctaggacaagggatcttcaagaagttctggaaaaatacatattatgagaaaattgtgcatgaatttcacaatttttgcaccaaaataaactagtgctagtctgttataacatgtctgaacaggctctagtttgatgccctcaaaaggataagacatgagtataaaaagagactccatcaaagcaatataaattctgatgaaatttaaacaagaagaaacattaaatttatgatgagaccagatgcagtggctcaggcctgtaatcccagcattttcagaggctgagacaggtgggccacatgagcccaggtattcaagaccagcctgggaaacgtggggaaatccccttttctacaaaaaatacaaaaattagctgggcatggtggcacatgcctgccgtctcagttattgtgaagtctgtgcagggaggatggcatgaacctgggaggtcaagattgcagtgagctatgatcatgccactgcactccagcatgggtgatggagagagatactgtcttaaaaaaagaatacttgtggtaacgtttgggtagaggaataatgaaatcattgatgctttataaaaaggttatggggacaatgcccaaaagaaataaacagtttgtaaacggataacttattttgagttagggcaagacaatgttgacagtgatgcatgaagcagcaggcagaccttccacatcatttttacagaaaaaaaaattaatcttgttcatgctgcaatgaagaggactgacagcaaacagcagaaacatagtcagaatttagagaacagcctggttaacatggtgaaacaccatctctagtaaaaatacaaaaattagctcagcatggtggcatgcgcctgtaatcccagctactcaggaggctgaggcaggggaatctcttgaacccaggaggtggaggatgcagtgaactgagatggcaacattacactctagcctgagcaacaagagcaaaactccatctcaaaaaaaaaaaaattgtcaagttccttctcttccattctttgccatcgtggtgtgtgcttgactctgcttcttgccacatcttctcagaagactttcaggattaagcgattcctggccaagaaacaaaagcaaaaccatcccactcccctgtggattcagatcaaaactggtaataaaatcaggtacgactccaaaaggagacattggagaagaaccaagctgggtctataaggaattgcatgtgagatggcacacatatttatgctgtctgagcatcacaatcacgttaccatatcaagctgaaaatgtcaccactatctggacagttggacatgttttattgggaatatgttttttctctgtaaatttgttataaacgcattggttggctgtgttcagtaataaacgtgagacttttcatttcaaaacaaaagtcaaatgatgtaattccatagagtaccttaatttctgttttttgttttgttttgttttgttttgagatcgagactccactgggttcagtggatcacacctgtggtcctgccactttgggaggcttaggtgggaggattggttgagaccaggagtctcctgggaatcttctcgtctcccctaacccagttaatgacagacctttgtcctttctgttatggaaaagtctatagaaaacaatatcagtgtgtcaaagcattatgtctgtcacaagctcatgaaaggaaaataaaaatgactaagccagagagaaaagtcaagctgggaactgtatcagataaacctacctcccattttgtttctaaacgagatagctacaaagactaaaagaaagctacatacagactgggcgcagtggctcatgcctctaatcctagcactttgggaggccgaggtgggcaaaccacagtacgtcaggagttccagaccagcctgactaatatggagaaaccctgtctctactaaaactgcaaaattagccgggcatggtggcgcatgcctgtaatcccagctactcaggaggctgaggcaggagaatcgcttgaacccaggaggcagaggttgtggtgagccgagattgcgctattgcactccagcctgggcaacaagagtgaaattccatgtcaaaacaaaacaaagctatagactcccctcacaaactggggacctcgagatctccaccctaaaatagttcttttgaatttcccactgccaatgtaaactaatagcttatcttcacaggtgtgggacagaacccatccctctgcacacctgagatgaatgcctatctgattgcttcccctgtcctatttatgtaaaaatgtagagtcactgaggcagtctaaggcataagtgactattcctccaccccctctcacatgtaaattgtgtattcagggccaggcatggtggtggctcacgcctgtaatcccagcactttgggaggccgaggtgggtggatcctgaggtcaggagatcgagaccatcctggcaaacatgaacacggtaaaaccctgtctctactgaaaatacaaaaaattagccaggtgtggtggtggaagcctgtagtccagctactcgggaggctgaggcaggagaatggcgtgaacccaggaggcagagcttgcagtgagtggagatcgggccactgcactccagcctgggtgacagagcgagactctgtcacggaaaaaaaaaaaaaaattgtgtattcagtgaaaggctgatgaaagactcaatgtgatcatttgttatctacgtgtgacccagaagccccccaattgcagttattccacctttccagaccaaaccaatgtataacttacatgttttgattgatgtattatgtctccctaaaatgtgtaaaaccaaactgcagcctgaacaccttgggcacacgttgtcaggacctcctgaggctgtgtcacgggggcatttttaaccttggcaaaatagatttctaaattgattgagacctagtagatacttttggttcacaagctcatgaacacagaagaaatcaaaatagaataagaaaaaaatgaggtgtagtggaaagcacaatatcagttccaaaatttgaactccttcatatttattcaacatagggagatgctcttcaactttgggtggttagattccatttgtgaaagatacatatttctaatgtagcaggatgagtcacagacaaaactcctcagacaccagattaaagaaggaagaggttttttattcagctgggagtgtcagcagactcgcgtcttaagagccaagctccccaaaaaagaaattcctagcccttttaagggcttacagctctaaggggtctacgtgaaaaggtcataatcaagtaagtgtgaggaatgtgactggaggctacatacatcagctaacagaacagaaagttttacagtactttctcatacaatgtctgaaatttacagataacaccagtagttttggtcaggggttaatattattattattattattattttcaccaccagggtcaggtggtggcgccaaggtcgtctagctatttatcttagttctgcttctttccaactttttgctttctcccttttctcctgtcttataaaccaggcaaaaggggaggttggggagaagctgggaaggacaacaggagaagtggtggcctcattccatactaatatttgattaaataacccattctatgtaattttagccaatttaaatggcaaataataaatgatcaattatatacatacataaaacttcctaatatttcacttagtattgctattactatgttcttgggacagaagttcagcctgtcagatacaagagagtggtgtctccataactgtgcttagaactccgtgctgcatgaatggataaactgttaagcaggaacctaggaaagctagaatgacaaagttcaagtttattaaaactagcaaaacatattccttactgctcatgcatgagtcacggtcataagatgtttacagttaaggaaagcagcttcatgatacctgcaaggacgaactcctacagaaacacaatgtccaagataacctaatatccgatgacaatgtatgcttttaagaagcaggctggtcgcaaactcctgacctcaggtgatctgcccacctcagccttccaaagttctgtcattacaggcttgggccactgtgcccggccaaagatagctttaaatcaacaaagtaataagttttgtcacactgtcagctcaccggcaggtagacataacttagcttttacttaggcccctatgtaagaaaaacttcatgaggaggcactcccccagccttctgaggacaccctactgtgtaactggtagctttcaataaactctcctcactgcattcggacacttgccttgaattctttactacgcaagatccaagaatgttaacatggggtgtagactgtgacctcgttttaggcaacaaaatgactgaacgttatacaaaaacaacaattgatccaattctcataaaagtaggaattttgtagtcctcatccagcatgccaagcaaagatcgacactgtggagtcaccgctcatgagaacaaaggggctgacagctgggaaacatgggtagatgagggtgaggcgctcagcagctgccaactgggattattgaaaagggcaataggatcttggaagggggagaacacagtataaagcgacacaaatgctgcagaggcactggccctgcaagcttcacatgggggagttggaaatccctgacaactgcacaatcttgcgtgtggatttcaacatcccgaagcaaccagattcctgctgtggctagactcggggataaggtgctgcgaaagacaggtttgaagcagaaagaccaagaaaacactcatctgagccagccccgggcgctgcagaacaaccatgggcaggccctccaccccgtctgggcggattctggacagtcggcggtgacccggagggagaaggaaaggtcgtcgagggggcggagcctgaaccggtgcttgggcggggccagaaggtggaggccgctttggaagccgggccaggttagagggtgggggtgggacctggaacgggactggggcggggcaagagggaggaggctgccttggggccgcccaggacagcgagaagggctggggccagagggttatcattttcggggcggggtctgaaaggggttttgttctgaagggcggggcctgaaggggggcggatccgggttctttcctcagctgggccatggctgtcgcctgctgtcatactcttgccctccaggactgggtcctccgggttctgattggtggattgtttctgatgtaccgtgatattacccctaatattacatgtagtgagccacctgtaccgaacgcttaatcgtttttcctcttaagttgaaaatagttttaatgcaaagagcctttttggagcaggtagagtcatgcatccttcaggcggggcacgctcccctcagtctgaagcagggcggggtagaggggcagggacctcggtaaaggactggagtagggcgctggttgcagctgggactgacaacgagaaggcttattaaactaagcaggatcctgggttgagtggataatgggaactgaaaggtgacatgcaaaactgcctattacacacaggaggtgaaggacaattcgtatttcatggaaataaagtcagggcccagagtagtggctcacatctgtaatcccagtgtgtctggaattggttccctctggtgggttcttggtctcgctgactttaagagtaaagccacagagcctcgcggtgagtgttacagttcttaaagatggcatgtccagagtttgttccttcagatgttcagatgtgtccggggttttttccttctggtgggttgtggtctcgcttgacttcaggattgaagcggcagacctttgcagcgagtgttacagctcttgaaactgtcgcgtctggggttgttttttcctcctggtgtgttcgtggtcttgctgacttcaggagtgaagctgcagaccttcgcagtaatttggccctgcccatgtcctgctaatgggtccattttacagagtgctgattggtccatttttacagagtgctgattggtgattttcaaacctttagctagacacagagcactgataggtgcatttttacagagtgctgattggtgcgtttacaaacttttagctagacacagaggcctgattggtgtgtttacaatcctttagctagtcagagaagttctccaagtccccacccgacccagaagcccagccggcttaacctctcaccagcactttgagaggcagaggtgggaggatctcttgagccaaggagttcaagatcagcctgggcaacatgatgagacctcgtctctactaaaaaaaaaaacaaaacagcccggtgtggtggtgcacgcctgtggccccagctgctcggggcacttaggtgggaggatcacttgagccagggagttggaagctgcagtgccctgatctcgccaccacactctagcttcagtgacagagctagaccctgtctcaaacaaacacgtaaataaatgagaggtgtaattcctcccttgaaaataaaggaagagattttctttcctttcatctcttttcttaggacactgatttcgaaagtttgcaaatggattttctctgtcttctgagttttttttttttttttttttcagatggagttttcctctagttgtttaggatggagtgcaattgcacgatcttggctcaccgcaacctccgactcccgggtacaagcctggttttgaactcctgacctcaagtgatttgcccgccttggcctctcaatgtgctgggattacaggcatgagccaccgcgcctggtctgaagtggtattttttagaaacgaactaaaccttttttcagcttaatgacccagggatgtatttctgaaggacttgggagctctctttgaaaggcaaaatacaagggagacagtacctgtatctcagtaggaaattaagtaattcaaacatcaaataattccaatttaaagctatggcctttaaataattctgagcctttgaggagagaggccatttctcttactgtctcctgtctctgaagaggaggaagtaaaagctgaaaaacaacaggaatgaattcagtgacaagaccagccagcgccactgatgaccaggcctgaggttaaaagattaactgccccccaactctaaccacatgtgctcttaatctgtcatgaccttttcccgtggaaccccttagagctgtaagcccttaaaagggccaggaactctttcttcggggggttcaattcttgagaggcaggtctgccgacactcccggccaaacaaagtcttcaaagagctcggttcttgagacgtgagttggccgatgctcccggctgaataaagccacttctttctttaaccgggtgtctgagggcttttatccgcggctgctcctgctacaccttgagaggaatgtgctcatgcaacctgagtccagcggaacgcaggcgtaacttctacgagttttcctggctggctgcggtggcttatgcctgtaatcccagcacattgggaggtcaaggcgggcagatcacttgaggtcagaagttcggaaccagcctggccaacatggtaaaacccactctctactaaaaatgcaaaacaaaaggcgaggcgcggtggctcacgcctgtaatcccagcattttggaaggctgaggcgggcggatcacaaggtcaggagtttgagaccagcctgcccaacatggcgaaaccctgtcactactaaaaatacaaaatttagcggctgggccaggagaatcgcttgaacccgggaggtggaggttgcagtgagcaggtgagatcgtgtcactgcactccagcctaggcaacagagcgagactctgtctcaaacaaacaaacaaaaaattagacaggcatggtggcgtgtgcctgtaatcccagctacttgggaggctgaggcaggagaactgcttgaatccaagaggtggaggttgcagtgagccgagatcgccccactgcactccagcctgggcgagtcttgcccttatttacaggaaaagagttctcctgtaaataactaggaagactaagcagccccagagataaggcctcctgggatcattgtccctttttatggagtgataacataaccttccttgaagtgtatgactccgtcaccaatcaacttgctgcaacctatgcactggtcttgaatggaaaatgtgttgattctcctaaaacttctctgtctttccctgtgtgtgaaaccttaacgtctctacttgggaacgttgatcccattcattaggagttgatgtttgccggtggctatcctcatgctttgtgttcagataaactctatacttaatcataaattctaaatgttattatttactgctgacatcagtttctgtcacattgtaggagcctcaccagagagggcacctgtagccatgttgtaaaactcacacttgtcaaaaagacatgggttagtgtttctccccctccctctgcatgaagctaattagctgacacagatggtcacctccattaccaactagagccaggatgaactatgtgtgaccaagggtgttgtcaagtccttttccctgaggactgattagtgtttatcttgaaaacatgtacttaatgggttgtatagaactgtgaagtgtctttctcttttttcaacctcttagctctttgcctctatttcccatcacattctggtctaaggcttacttattaataaaatggtgtttatttctttctctattatcgtcatggagatgttttgtcatttgggggaagatttttttgtttcgttttcaattgtattttcttaacaattagaaagtgaagtaaaaagtatttggccaggcgcggtggctcccgcctgtgatcccagcactttgaggaggcccaggcaggtggatcccttaaagtcaagagtttgagaccacactggccaacatggtgaaactcgtctacaaaaatacaaaaattagccgggcatggtggcacgcgcctgtaattgcagatactctggaggctgaggcaggggaatcgctgaaacccaggaggcagaggctgcagtgagccgagatcccatcacggcactctagcctgggcgacagagaaatactctgtctcaaaacaaaagaaataagtaaataaataaaggaataaatctcttccaaaaatgtgctgaggcaactaactggatatccacatggaaaagaatactgttagatccctatctcacacaatcaaactcttattttaaaacgtttaaaaaaaaaggaaaaaaaagagagagtgacgaggaagggagccctgcgggagggggtgttacattgtcgcccaggctggcctggacccccaggctcagcaatcctcccgccgctgcttcctgagtagctgggacctcagtctcccgcgcccgcgcccacatccctgctgtgtttatccagaaggtggtgacctcactcctcgctggcctgagcattccgtcccacatcccaggcggtggccctagggaagtctctgcagctgagcacagggtggactctccctcccaagtgaatggagactggaaagggagaggatttctattctgttttgtgggctgtcagcatgaaatcgtacgttccatccaggcagggctttgcattttacattccagtttgcatccccgttccagacaattccagggcttttgaatcatgcctcagccttcctggccggtctcgcctccaaaacccgaaaactgaggccctgggagccaggctgagagactcacaggtcccgccacagccccgccctctgtcggttctaaagggtaaagtctctctgccccgcccctacctcgcccaagcccgcccacctcctcgcgggtcccgcccaggcctggcttctttcctgcgcgcgcagcttcgcgcagacccggaagcggacggcgtggagtgactatcccaccgccgcgggtgagtttcgctctgttttgtattaagtctgtgcttcccaggtccctggcgcttctgtacctggggcgtggggtctccactaacctggaaattctcagccgtcttccttcacccagagcaagttgagacgaccccgtgagagtccgggggtcgcttccttttgggtttaaggtccccctgaggctggtcccgtcccgggtgtttctgctatagggcaatgtatacactttctatcacgtagttttcctgctctgaaactttttctgactcctcccgtcccgcgctttttaaagtcctcacccgagaggtgaattccctccctgagcgcctcccagtctcgccctcgttggcagctggacgcagcgcggcggccccagccccaaggaggccgcgtcctctgtctggtcctgggatcctgcagaccccacccttgtcttaaggcgccgtggcgccgccgcctccctccttttgcgggccctactgctccccaggttcgcctccacagtcactgctttccctgagcccgagttagggaggtgcccggggcctgtcctgtgacacggggtgttcttgcctgcccagctccagcccctggaaaatgcgctcccccgggatgcaggcgttttgctccaaaccctcctgtgtcttatccaaagcctccggtgcttgtgtaggctaaagggatcaggagacagacgtagagcagtagaaaacctgagacagaaaagaagaataaaaaagactcataacagatggcaaagtagaggatgggtgagggatttgccagacacagcaaatgtgggggaaaaaaaaaaaaaggaggagaaaagcaactggagaaatgtagagaaaaggtagatgtacagagagatgaaggacagagagcaaggtagggagagggacagcaaagagggaggctcatcagagtgagggagaggaggagggatttggagccagggcagacagagcagagtggtgctggtggcaaggagaacagagggagaagcacagcagggaggacacctggggatctggggtgctagagagtggggatgagggtataacagggaagagagaatgtaacagggagagcagaggaggcgcagagatggtgttgcgggaaactaagtactagagagaccggtatgcgggagacagaacgatgtttatttaaggtacgcaccggctcagtggatttacatctaaaaagctgagcatttcaacaaagacagagtggggtttttataagcaggcttacagaagcaaaataaaagcagttaatcatgtaatgattggtcacataatctatagcatagcataacttgtggccttgcatagctggtggtcttgtagctgcattgaaagaaaaacaagaacagctaaatacagactttttttttcttcactcttgttctaaagtggggttttctggagctcattcctttggcttcagctgcacaaaaagcgttatcttataactgtccttgaagtgagcttgctaggcagaggaaaacttgttcttcttttctttttaacccttgccttgcctgttagttttttggagtgaatgaatgcatattgattttttaaatttctgcctcagttttctccctttgctgctttttataaataaggttttaatagaaagcaccactattactggattcttcatgaaagagcaggttttcttctttaggcacaggctgatatttatatggagctattagctgagtggtagtctgcctagtcacaattgcttctatagttgattgaacgttcttaacaaggagaggtgaggtaagggagtattaaaccaattcttagtatttctagaaccactcctgttaaggttttgaatcgactgaaggaggaaaaccagcctctaaagagggactcgggagtctactttgtctaagtctggactggaacatgggataatttttttattcttgcagttacttctataacagccttcctattgtcattgatttctaggcagcaattagttagattaaactttctacatactcctccttcctaggctaggaggtagtcgaaagctaatctattttggtagatggcatttctcatttttgtggcttgctgggccagtaagtctaatgcatttgctgtttcattagtgatgattccaagtactgcttgcaactttatgatgcggttaagcgtgtaaacttaagtgtgcccggctcaatttttgaatttttagtagagacagggtttcaccatgttggccaggctggtctcgaactcctgagctcaagcgatcctcacacctcagcctcctaagtaactgggaccacagacacacagacgtgcacaaccatgcctggctaagtttttgtacttttggtagagatggggtttcaccacgttgcccaggctggtctcaaacctgagctcaagagatctacgcacctcggcctcccagagtgctgggatgacaggcatgagccaccgcacccagcctttgcatgaggtttggtcaggcctgggtctgtgccctaaaggggagctcatcccaccccagctccccactgctgcagcgtgtgtgtgggcttctccgggaggggagtgggagttttcctgtaggagtttattgtccctggtgtggtcggcagcataggggaccgtatgtcctcaggatgaggtctcctttgtatgtgttgttgtgttacagggaggggatatgttgattctgagcaataaacaacatatttctaacattcaggattgacttctaaagactcttggtatgtgaggaagaaacctggaagaggaagaggaaagcaaaggagtcagggatggctcttcctcaggtgagatgatattcttggtggattgttctgtctccttcttttcagaaatgctgaccttggagtttggaatcttctctgagtctgaagcatcttgcctgacaggtttgctcgcactcacccatgccttccttcattccctcttatcttgcttagattccatctcccatgatccagtgacatgaacttgggaagaggctgcactgggcatggtcctgggaagggctcacacccagacatggatggagatggggtgagggtcccatggtgtcagtgctgttgggcagcagggattgttcaggggctacatctggatgctctgtcagctctctgtagaccaggattagagcaactgccaatggaagtcatgtattcatgtgcacaaagtatgtggtaaattctagaaaaggtgaccaatatggagcaattttttctgcctgattttatactacatttttaggtaattgagtgagttactgtgtttctgactccaactatcttactaattagaatggaaagttcatacacagacatgaatgatacaagatgttttattccgtctttattttaagaataggaaatcaacctgaataatagcaggagattcattcaaccattcttagcacattacgctcatggagactgtggggttcctgtggagaggcttgtgaaacaggtgttttggttataatttttattatcagtactattatattatgataatattattatatttcacatatatgaagtcttgctttgtcgcccaggctgaagtgcagtggcatgatcttggctcacagcaacctccaccttccgggttcaagtgattctcctgcctcagcctcccgagtagctgggattataggtgtgcaccaccacgcccagctaattttgttgtatttttattagtgacgagtatcaccatgttggccaggctggtctcaaactactgacttcaggtgatctgcctgcctcagcctcctggagtgctgggattacaggtataagccaccatgcccagccccaatgattattattaaatatatatttttcttttttttaaaattattattatactttaagttttagggtacatgtgcacaatgtgcaggttagttacatatgtatacatgtgccatattggtgtgctgcacccattaactcatcatttagcattaggtatatctcctaatgctatccctcccccctcccccaccccacaacagtccccaaaatatatatttttctatttaaacatcacatagtgaatatatttgttttgtggtaaaactccaagcaaagctgcagcttagaccctttgccatcaggcatctcccttccctgttacatcctccacccttcttccaaactcactggggagtcaccactgtcagttctgtgccaggcgtcagagcaagtctcatacacatgtatttctgcatcatatgagactttagaaaaaattattcaataaattgaaaaaaaaataacttttttacaaaaattagcctggcgtgatggcacgtgcccctaatcccagctattcaggaagctgaggcaggagaatcacttgaacctgggaagcagacattgcagtgagctgagattgtgccactgcaccccagcctgggcacagatcaagactccatctcaaaaaaaaaaaaaaatttttacgtttggggccatatgttccggtttcttacataggtaaactagggtcatcggggtttgttgttcaggttatttcatcactctggtgttaagtcccgtacccaatagttattttttatttatttatttttttgagactgagttttgctctttttgtccaggctggagcataatggcatgatctcaactcactgcaacctctgcctcccgggttcaagtgattctcctgcctcagcctcctgagtagctgaaattacaggggcctgctaccatgccttgataatttttgtatttttagtagagacagggtttcaccatgtgggccaggctgatcttgaactcctgacatttgatccacctgcctcagccactcaaagtggtgggattacaggcatgagccaccgcatctggcccccagtagttattttttctagtcttctccttcctcccaccctccaccctcaagtagacgccagtgtctgttgttttctttgtgctccagtaaatattttacttcgatatttgatcctgctggttgtgaaaatttacatgttctcatgttagtaaacgtggatagcttgctctttgacatctgcattggaaattggctgaatgacaaatgggcctttgcaacttttccctgtataaagagtgccatagtggctgcctctgtgcacacccgcgttactacagatatctcacgattcctccaggtcaggcagttgaaagggtgattacttcctctaggatgaggcatttcctgttttcttagatctgacaagattcccccctgtccccaactgccaatgtatccttttgcagcaagatgagattcctcttcagttcaacaaaacttgctactttttatatttttaaagcctttatatgtatacacacccacacacacaatatacacatacacatatacatatacatacatatacacatgcacaaatatatatattttgaacaacttttccattttgaaaatctggggaaaatgacaaccctttgtattaacatctagttttttgtgagtctgtgtaggtttcattatttgttgacatatatatatatatatatatacacacatacataaaatggattttcatactttgagtaatctagttttcatatattttcttttgttttgagactgggtcttactgtgttgcccaggctggagcacagtggcacgatcttagctcactgaaacctccaccctgaggctcaagccatcttcctacctcagggtcccaagtagctgggaaccacaggtgcctgccaccatgcctcgctaattcgctaattttttttttttttggagatggagtatctgttgcccagactgtagtgcagtggtgcgatttcggatcattgcaacctctgcctcctgggatcaagcaattctcctgcatcagcctcccaggtagctgggataacaggcatgtgccactgcacccagccagattttagtttctcatctttcactgtgaactgtgaatgtcatctctgaagacatcattcatactctgcctcatctagatactgaatgtcacttggtgtgtcaataaatgtttctgggccgggcactgtgtctgacgcctgtaatcccagcactttgggaggccgaggtgggcggatcacgagatcaggagatcaagacaatcctggctaacacggtgaaaccccgtctctactaaaaatacaaaaaattagctgggcgtggtggtgggcgcctgtagtcccagctactcgggaggctgaggcaggagaatggcgtgaaccggggaggcggagcttgcagtgagccgagatcgcgccactgtactccagcctgggcgacagagcgagactccgtctcaaaaaaataaaaataaaaaaaaaaacgtttctgggccgggcacggtggatcatgcatgtaattccagcactttgagaggctgagtcaggcagatcaggaggtcaggagtttgagaccaaactgggcaatatggtgaaaccccgtttctgctaaaaatacaaaaattaactggtcgtggtggcacgtgcctataatttcagctattcaggaggctaaggcaggagaatcgtttgatcctgggacttggaggttgcattgagcagagactgtgccattgcactccaggctgggcaacagagtgagactccacctttaaaaaaaaaaaaaagaactttagtaaacacaactgggaagacaaaatgcggtgaaaaatcccttactcagatttgttagaacattcactgcatttaaatccatgccttcacctctctcttcttctcattttctgtaaagataagaactcctcccataaccatttggttaaaatgtgttttcatttcagggtctattgacattcagggatgtggccatagaattctctcaggaggagtggaaatgcctggaccctgctcagaggactctatacagggacgtgatgctggagaattataggaacctggtctccctgggtgaggatgacttccctcctggggatgtgcccttgcgtatctttgtattttctctccttttttttttttttttttttttttttgagatggagtctcgctctgtcgcccaggctggagtgctgtggcatgatctcggctcacggccagctccgcctcccgggttcacgccattctcctacttcagcctcccaagtagctgggactacaggcacccaccaacatgcctggctaattttttgtactattttttactagagacggagtttcaccatgttagccaggatggccttgaaatcctgacctcgtgatccacacacctcggcctcccaaagtgctgggactacaggcataagccaccgtgcccggcctatattttctcttgtttttagataaagtgtctctctctgtcagcccgggtggagtacaatggtgtgatcatggctcactgcaatcttgaattcctgggctcaagtgattgtcccacctgagcctcccctggtagctggtacaggtgcatgccaccatgtcgggcaacttttttagtttgttttttttccagacagggtcttgctgtgttgttgaaattcatcctgatctcctgggctccagagatcctccttagtctcccgagtagctgggattacaggtgccaaaccccatacctaattattggcttttattttaaaaatttttgcatatgtgcagctgggcatggtggctcacacctgtaatcccagcacttcgggaggctgaggtgggtggatcacgaggtcaggagatcaagaccaccctggccaacagggtgaaaccccctctctactaaaaatacaaaaattagccaggtgtggtggcacgtgcctgtaatccaggctgagacaacaaaatcacatgaacctgggagtcagaggttgcagtgagccaagattgccactgcactccagactggcgacagagcgggactctgtctcaaaaaaaaaaagaaaaaaaaatttcatatgtgtgtccttaaggctgagtctgtgagtctcttgtagacaacatgtagttgattcctgttgattcagccagtctttgccttctgagtgcagattaaatacttacagttgaagtattactgatggagaagaccttacccttgtgattctgttacatattatctgtatttattgtaggtttttttgttcttcatttctcatttactacttttgtgtttatttgcttttttgtgtagacatgctttgactcccttcttattgacttttgtttgtttgtttgtttatgatggagtcttactctgtccccaaggctacagttcaatggtacgatcttggctcaccgcagccggctccgcctttcaggctcaaacaatttttgtgccccagtggctcacgcctgtaatcccagcacttcgggaggccgaggcaggcaaatcacctgaggtcaggagttcaaaaccagcctgcctaacatggcgaaactccgtctctactaaaacacacaaattagccggacactgtggtgggcgcctgtaatcctgctactcaagagtctaatgcaggagagtcgcttgaaccctggaggtggaggttgaagtgagccgagattgtgccactgccctccagcctgggtgacagcacgagactctgtctcaaaaaaaaaaaaacaacaacaacaaaattccataacctgcaaaagccactctttctctactagaactctgtatttatgtcagaattatttctctgtatgttgcattcgcattaacatatatgtagtgttttttcatgcttttttcttctaaataacagaaaaaaaagttgaattatctagagaaggtatacttacaccagtttctgtatgtgtcctgttatttgcctattcatttatttatttctttgttgatgagatgaagttttgttcttgtcgcccatgctggagtgcaatggcacaatctcgggtcactccaacctccaactcccaggttcaagtgattctcctgcctcagtgtcctgagtagctgggattacaggcatgtgccaccacacctagctaattttgtattttagtagacacaggctttctcctttttggtcaggctggtctcgaacccctgccctaaagtgatccaccaacctcggcctcctaaactactgggattataggtgtgaaccaccgtgcccggcctgtctttttatttacctttactggagaactttatatatatttgtgggttggagatactctttagaattctttcatttctttctttttttctttttaagacggagtctcggtctgtcacccaggctggagtgcggtggtgcgatcttggctaactgcagcctctgcctcccaggttcaagtgattttcctgcttcagtctcccaagtagctgggactacaggcacatgccaccacacctggctaatgtgtgtgtgtgtgtgtgtttgtgtagaaatggggtttcaccctgttagccagtatgttcttcatctcctgacctcgtgatcctcctgcctcagcctcccaaagtgctgggattacaggcgtgaaccaccatgcctggccagcctcaaagtttttaaaacacgtaattgctatagatggcttcaggtattgcaagatttatggtacaggctctaaacttcctttgtttaatcagatttgtcagccttcagtgatgttgatgatgagatgctcctgttcctgcctcagtcatttcactgtcagaaatagcttagactggccacccgaggtggctcacacctctaatcccaacagtttgggatgccaaggtgggcagatcgcttgaagtcaggagtttgagaccagtcttgccagcatggtgaaacctcaaatctactaaatacaagaatttggccgggcacggtggctcaagccagttatcccagcactttgggaggccgagaggggcagatcacctgaggtcaggagttcaagaccagcctggccaacatgttgaaaccccgtctctactaaaaatacaaaaattagctgagcgtggtggcgcaaggctgttatcccaagtacttgagaggccgaggcaggagaatcactagaacctgggaggtggaggttgcagtgagccaagattgccccactacactccagtccaggcaacaaagtaagactccgggctgaggtgggaaaatcatgccactacactccagcatgggtgatagtatgtgactcagtctcaaacacaaacaaaaagagaaatagcttaaactgggaggcttcagacacagaaatttatttctcatgaatttggaaagtgggaaatccaagagcaaggtgccagccaaattggttcctggtgagagcattcttcatggtttagcccagccatcttcctgccgtgtcctgacatggtggaaacaggaacaggcaacgagctctttaatatctctttttatgaaagcacaagtcctattcacgagtagtcaacacccatgaccaaattgtctcaaaggccccatctgcagaacatccttttggagaataagaactctgaacatggcttttggccaatatgaacattcagaccagggaggctgcatcatattgtttgtgtttttattgtatgatttgatttataaaatgttttcactgatctcagtttaaaaattttcccagtacacattctatgttttatattttgtgcatagtgaactagataattaataccaactatatatatatatatatatatatatatatatatatatatatatatataaaattgctgtattgcctggctgtttcataaatgtagttgtgacatcataattgcaccctctgacaccgttagtcaatttttttttttttttttttggagatgaaatctcactctgtcactcagctggagtgcacaggtgcaatctcggctcactacaacctccacctcctgggttcaaatgattctcctgcctcagccttccaagtagctgagattacaggcagccaccaccatgcccagctaatttttttgtatttttagtagagtggggatttcaccatgttggccaggctactcttgaactcctcacctcatgatctgcccacctcagcctcccaaagtgctgggattacagacctgagccaccgtgtccagccgttagtcaattcttattccttataatgctgtgtatttttttgacctcataagtcagaaggtagtgatcttaacatgtatttcagttcttatattgtctgctggtggcaagtagaagtcgtggcatttttcttaacagggaattgtttagaattttgcatgttgtataaatgtacttattatttgcttcctggttttatgggttacaatattttactaattaatttttatgattgtacatgaggcttttcggtatgtggtatgcaatataactgacacagtccactagttaatgtcacacagtgccaccggatgctgtggctcacgcctgcaatcccaggactttgggaggctgaggtggctggatcacttgaggtcataagttcgaggccagcctggccaacatgttgaaaccctatctctactaaaaatacaaaaattagccaaacgtggtagtgtgtgcgtgtaatcccaggtactcaggaggctgaggcaggagaatggcttgaacccaaaaggtggaggttgcagtgagctgagatcgggccattgaactccaggcggttgtgacagagtgaaacttcatctcaaaaatataaaaataaaaaatttgtttaaaaatgtcaaaatgtgccttttctgcaaggatataggtaattttatgacagttattcagaaaaacattgtattaacattttttttcaagatggaatctcactttgtcacccaggctgaagtacagtggtgcaatctcagctcactgcaacctttgcctcttgggttcaaacgattcttgtgcctcgtgagtcccatgagtacgtgggactaaaaatttgggactaaaaaagattaaaaattacattttgtaatcttttcttatcttctcagtgctatgattgtttgacaatacagaatttccattgattttggttatccttacataatcttgttgtggattattttccaacacagtacatcatgtggtcctttagcatctatttgtatacagtaaatatgctgtaaatgtgaagaatatatacttttcattgatgtgacagtgatatgttttttacaaactgttagacactttagggtcacgatggaaaaatattccttactttaggctacacgtttttgtgccctgtcagtgttttgtcacgatattggaaatagacttccgtaaaaataatttgaagcacatgtaatcgccctttatttgttaaagaatcttatgcttttctgttcctaaactttgagggtcatgtttgcaaagtttaaaataagtattgttttttgtgtcatatttacacatttcagcattatttaccatctgtacttaatttgaaaccttttggtgtgtatactttttagatatctcttccaaatgcatgatgaaggagttctcgtcaacagcacaaggcaatagagaagtgttccatgcagggacatctcaaagacatgaaagtcatcacaatggagatttttgtttccaggatattgataaagatattcatgacattgagtttcagtggcaagaagatgaaagaaatggccatgaagcactcatgacaaaaatcaaaaagttgacaggtagtacagagcgatatgatcaaaattatgctggaaacaagcctgttaaatatcagcttggattcagctttcattcgcatctgcctgaactgcacatatttcacactgaagagaaaattgataatcaagttgtgaagtctatccacgatgcttccttggtttcaacagcccaaagaatttcttgtaggcctgaaacccatatttctaatgactatgggaataatttcctgaattcttcattattcacacaaaaacaggaagtacatatgagggaaaaatctttccaatgcaatgacagtggcaaagcctataattgtagctcactcttaaggaaacatcagttaatccatttaggagagaaacaatataaatgcgatatatgtggcaaggtctttaattcgaagcgatacgttgcacgccatcgtagatgtcacactggtgagaaaccttacaagtgtaatgagtgtggcaagaccttcagtcagacatattacctaacatgccatcgtagacttcatactggagagaaaccttacaaatgtgaagaatgtgacaaagctttccatttcaaatcaaagcttcaaatacataggagaattcatactggagagaaaccgtacaagtgtaatgagtgtggcaagacctttagtcagaagtcgtaccttacatgccatcgtaggcttcatactggagagaaaccttacaagtgtaatgagtgtggcaagacctttagtcggaagtcacattttacatgccatcatagagttcatactggagagaaaccttacaagtgtaatgagtgtagcaagacctttagtcacaagtcatctcttacataccatcgtagacttcatactgaagagaaaccttacaagtgtaatgagtgtggcaagaccttcaatcagcagttaacccttaacatttgtagacttcatagtggagagaaaccttacaaatgtgaagaatgtgacaaagcctacagtttcaaatcaaaccttgaaatacatcagaaaattcatactgaagagaatccttacaagtgtaatgagtgtggcaagaccttcagccggacgtcatcccttacataccatcatagacttcatactggacagaaaccttacaaatgtgaagattgtgatgaagctttcagtttcaaatcaaaccttgaaagacataggagaatttatactggagagaaactacacgtgtaatgagtgtggtaagaccttcaatcaggagttaacccttacatgccatcgtaggcttcatagtggagagaaaccttacaaatatgaagaacttgacaaagcttacaatttcaaatcaaaccttgaaatacatcagaaaattcgtactgaagagaatcttacaagtgtaatgagtgtggcaagaccttgagtcatacgtcatcttttgtgtaccatcataaacttcatagtggagagaccttacaaatgtgaagaatgtgaagaagctttctgtttcaaatccaaccttgaaagacataggagaattcacactggtgagaaaccttacaggtgtaatgagtgtggcaagaccttcagccagacctcatcccttacatgccattgtagacttcgtactggagagaaaccttacaaatgtgaagaatttgagttttccatttcaaatcaaaccttgaaagacaaaggagaattcatactggagagaaaccatacaagtgtaatgagtgtggcaagacctttagtcagaactcataccttacacgccatcgtagacttcatactggaggataccttacaaatgtaatgagtgtggcaagacctttagtcagaactcataccttacatgccatcatagacttcatactggagagataccttaaaagtgtagtgagtgtggcaagacctttagtctgaagtcataccttacgcaccatcgtagacttcatactggagaggtaccttacaaggataatgagtgtagaaaaacctttcatgggcagtcagcattttacaaatgtaatgattgtcaccaagtcttgagtaatgctacaactattgcaaatcattggagaatccataatgaagagagatcctacaagtgtgataaatgcagaataaatgcagaaaatttttcagacatccttcatacctttgcagttcatgggtgaagtcgtattagaaaccttacaaatgtgaagaatgtgatgaagctttcagattcaaatcaaaccttgatagtcatagaattcatactagagagaaaccttagcagtgtaatgaacgtggcaaggttttaaatcaaaaagcaaagcttgcacatcatcatagaattcatactggagataaacgttacaaatgtgaagcatgtgacaaagtttacagtcgcaaatcaagcctccaaagacaggagaattcatactggagagaaagcttacatatgtgaagaatgtcaccaagttttcagtcacactcaaaccttgaaagacacaggagaattcctactggagagatagcataaaaatgtaagagtttgtgacaaggctttcaggcataattcgcacctggcacaacatcctagaattcacattggagagaaagcttacaagtataatgaatgtgacaggtctttagtgggcagtcaacacttgtttaccatcaggcaatccatggtgtagggaaactttacttatgtaatgattgtcacaaagtcttcagttacactacaaccattgcgaatcattggagaatccataatgaagagagatcatactagtttaataaatttggcaaatttttcagacattgttcataacttgcagttcatcggcgaactcgtactggagagaaaccttacaaatgtcatgattgtgacaaggtctcagtcaagcttcattctatgcaaaacataggagaattcatacaggagagaaacctcacaagtgtgatgattgcggcaaagcctttaattcacattcacacctcactagacatcagagaatgcatactggacagaaatcttataaatgtcatcagtgtgccaaagtcttcagtctgagctcactccttgcaggatatcagaaaattcattttggagatagttgttccaaatacaatgtgtatagcaaaccatcaagcattaattgacactagagtcagttcagcattgacttgagtttgacttaacattgagttgaagccttaattgacattaaagtgtttatgttaagaggactgggccaggcacagtggctcacacctgtaatctgagcgctttgggaggccagcaccggtagatcacttgagttcaggagtttgaggtcagcctggccaacagacgtgagccattttcccagcctgttttttgtttctttaacaaaaactgatagggatttttttttttttttttgagatggagtttcactcttgttgcccaggctggactgcaatggagcgatcccagctcactacaacctccgcctcccaggttcaagcaattctcctgcctcagcctccagagtagctaggattacaggcatgagccaccacgcccagctaattttgtatttttagtagagatggggtttctccatgttggttaggctggtcttgaactcccagcctcagatgatccacccacctcggcctcccaaagtgctgggattacaggcgtgagccactgcgcccagccccagtgataaggatttttatgggtaccgtgttgaatctaaatcacattgggttatataatcatttaacaatattaatttttccaaaccataagtatgggttgtagctctatgtttctaatcattttgatcaatgtttgtagatttcaaggtaaaaacctctgacctttttacgtttatttctaagtatttcttactttaagttctccagccaatggaagtgttttaaaattttcttttaaagttgtttgttgttaaaagtatggaaattcaactaatttttggtgctgatactgtattgtgcaaatccactgaatatgttacttagttccagtagtattttggttgactctttgtgattttctgcacagaagatcatgtcgtctacaaacaaatataattttacttctttctttctgatttcgatgagtttgatttcttctgctatttaattgctctagctaggacagccagtattgattgaatagaaggggtgagagcactcttgcatcatgtgagatcctccaggaaaggcattccattttccctacttgattattcactcattggtcatttcatggatggtctttctattgtttaggtaaatttcctttctatctattttgtttaggatttctatgatgactggattttgaattttgtgaaatgctttttctccctctattaagatgatgtggttttcatctttcattctgttcaagtggcatatcacattgatttgcttgaatatgttgaaccatccttgcatcccagaaataagtggcacttgaatatctacaatcctttttacatcctcttgaatacagttttctagtacaagggatcttgatgaagttcatggaaaaatacatattatgagaaaattgtgcatgaatttcacagtttttgcaccaaattaaactggtacaagtctgttataacatgtctgaacaggctgtagttgaaggcactcagaaggataagacataagtttgaaaagagactctatcaaagtaaaataaattctgctaaaattgaaacaaaaagaaacatcaaatttatgatgagatcagatgcagtgtcaccacaccctgctaatttttgtatttttagtagagatggggtttcaccatattggccaggctggtcttgaactcgtgacctcgtgatccacccgcctcggcctcccaaagtgctgggattacaggcatgagccactgcacctggcccacatcagttttacaaaaaaaaattaaccttgtttgtgccgcaatgaagaggactgacaggtaacagcagaaatagtagtcaggagttcgagaacaggctggttaacatggtgaaaccccgtctctactaaaaatacaaaaattaactgggtatggtggcagatgccagtaatcccagttactgggaaggctgaagccagagaatcacttgaacctcagaggcagaggttgcagtgagccgagatggcgccattgcactccagcctgcgcaacaagagcgaaactttgtctcaaaaagaaaaaaaaaaagatgtcaagcctcttctcttcctctctccccttgtggtgtgtacttgactctgcctctcaccagatcttcttataagactttcaggattaagcgattcctggccaagaaacaaaagcaaaaccgttccattccccagtggattcagatcaaaactggtaataaaatcaggtacaactttaaaaggagacattggagaagaatcaagctgggtctataaggaattgcacgtgagatggcacacatatttatgctgtctgagcattacaatcatgttaccatatcaagctgaaaatgtcaccactatctggagagttggacatgttttattgggaatatattttttctctctgaatctgttaggaacatgttggttggctgggttcagtaataaatatgtgaggcttttcatttaaaaaaaaagtcaaatgatgtaattgcatagagtaccttagtttctgtattgctttttaggtttttttttttttttttttaactccactgggtcagtggatcacacctgtgatccttgcactttgggaggctgaggtgagaggattggctgagaccaggagtctcctgggaatcttctcgtctcctgtaacccagttcacgacagacccttggactttactatattggaaaaatctacataaaacaatgtcagtgtgtcaaagcattatgtctgtcacaagcttgtgaaaggaaaataaaaattactaagccaaagagaaaagtcaagctgggaactgcagcagacaaacctgccttccattttattcttaaacaagatagctagaaagacaaaaaaaaaaaaaaaaaagctacatagaggccgggcacggtggctcatgccgctaatcccaccacgttgggaggctgaggcgggcggatcacctgaggttgggactttgagaccagcctgactaacatggagatatcccgtctctactaaaaacacaaaacttggcaaggcatggtggcacatgcctgtcatcccagctactcgggagggtgaggcaggagaatcgcttgaacccaggaggcggaagttgcagtgagccgagatcgcgctactgcactccaacctggacgacagagtgagactccatctcaaaaaaaaaaaaaagaaacttgcagcaaacatggtatgatataaaaatcctttgccacaggggagaaccaggtatgataagttgctacatggagagcaatatgtgagtttctactctgtcttcgggtgccttcccagagatgcccccacattttcctacagcagtggggatataggatggactgaccctccccaccacacacacacacacacacacacacacacacacacacacacacacacacacacaccccccccccccccccccccggggaaaagcccatataaagcagttcccatttccctccacaaactgcgggctcccagtgaaaactaccttatagactttcttgcaaatcccattcttttctggccttctacgggatgacaggggcctagagaaggcagtactgggtggagttacctgggtgcgcatttgttgggatgtggcattttatggctattctaaggtctgttatcagttgtctgtcttggggagaatgtgcagtcgccatggtccaataatcctctatccaaggaccacacaggtcaccacaggtgctcaatcagtgtgatccacatggtgtgatgtgtgctctggcagggcacagatggacacactcagctctgtcaatgtgtaaacagggagtgctgcaatgacatggtttattcacagtcaccatggaatctgatgtggcattttaaaaaatgcgtagatctattgcaactgttatgaaaacatcactgattggccacgcacggtggcttacacctgtaatcccagcactttgggaggttgaggcaggcagatcacctgaggtcgggagtttgagaccagcctgaccaacatggtgaaacttgtctctactaaaagtacaaaattagcctggcatggtggcacatgcctgtaatcccagcttctccagaggctgaggcaggagaatcacttgaagccagttggcagaggttggggtaagcggaaatcacgccattgcactccagcctgggcaacaagagtgaaactccatctcgaaaaaaaaaaagaaaagaaaaagaaaaagaaaacatcactgattggtgaaagctattgaattagacagaaatgtaactctgcaaatatatatttaaatatttaatagtgaacagaatatctgaatggtgtgtatatacatatatatgttgtatgtgatttcagatgcaattttagatattctatgaaattgtgtaggcagaaggatacacctcaaactggtgaaaattatgtgtagatataaatgactactttttattttagtgtttaaatattttattacgtttgttgaggtgtgtattaactttctaatgaattaccacagtatagccagcagtttactacagcactcatttattttctcacagttcacagatgaaaaatgtgtcaggtttttctgggtactctgtctagtctcaccaggccaaaatcaaggtcaaagccatgggatcgactcttgagactgtgggggcagaattctcttctaagctcattcagattgttgtcagaattcatttctttctcctggtccccatattttcaaaatacagcatgtgaaattactctcgtgctcctgagtcctgacttcctccactattgcatctctctgacatatatttctgcttcaaggacacataggacccacccagataatccaagataactttcttttgttttgttttgttttttgttttttgtttttgagactgagtctggctctgtcaaccaggctgcagtgcagtggtgccttctctgctcactgcaacctctgcctcccaggttaaagtgattctcctgcctcagccccccgagtagctgggattacaggcgtgcaccaccgtgctggctaatttttatatttttagtagagatggggtttcaccatgttggccaggctggtcttgaactcctgacctcaagtgatccacccacctcggcctttcaaaatgctggcattacacacagttttttctttcaaagtcaaatgaggccaggcatggtagcgggtgcctttagtcccacctactcaggaggctgaggtaggaggatcgcttgaacgcaagaggcagaggatgcagtgagccgagatcgcaccaatgtactcccacctggccgacagagcgaaactcagtctcaaaaaataaaataaaattcaaatgactagtagccttcattaattaataaattaccagacaaattcctttttgcaggtaacataaacaagattagcaccaggagttggagacctgcctacaacattataggaccagtaaacctttttgcactgagaaaataatttgtcaatctagctagaaaattattaccgtctgggatatttcggttaagagaaatttgtatactatatattgataaactgtatttgtaatactctattttacatagttatataactatacatcaatataattaactatacatcaatataattatatagtaatatatatttaaatattggtaaactctacgtttctatgaaatttctatattatttggtattcagttgtgctcacgtgtccattgatttcttttcttttttttttttctgagaccaagtctcgctctgtagcccaggctggggagcagtgttgtgatctcagctcactgcaacctctgcctcgcaggtttgagcaattctcctctctcagccttccaggtagctgggattacaggcgcgcaccaccacgtccagctaatttttgtctttttggtagagacgaggtttcaccatgttggccaggccggtccctaactcttgacctcaggtgatctgcctacctaggcctcccaaagtgctaggattacagacgtgagccactatgcccgaccaggtttctttcatttttaaaagacttttaagttcaggggtacatgtgcaggtctgttacataggtaaacgtgtgtcatgggagtttgttgtacagatcacttcatcaccaggatataaattctagtgcccactaatcatatttcctgatcctctcccttctcccaccctatgccctccaataggccccagtgtgtgttgttcccctctatgtatctgtcttctcatcatttacctccctcttataagtgagaacatgtggcatttgggtttgtgttcctgtgttactttgctaaggaaaatggcctccagctccatccatgtccctgcaaaggacatgatctcgttcttttttatggctgcatagtattccatggtgtataggtaccacattttctttatccagtccatgggtgatgggcattttggttgacttcatgtttgctattgtgaatagtgctgcaacgaacatacacgtgcatgcgtctttacaatagaacaatttatattcctttaggcatatatcctgtaatgagattgctgggtcgaaggatatatctctctttaggtctattttgtggaaagcagagtgggaattcaaaaatttctaatgtaaactaacggcttcatgttcttccttttacttcctttcatgtctttcaaaatccttcttaggtactttgcctgattccatttatctgcatataacttaaaagatcaaaggtctaaatattataaggaaatctactttgggtggaaagacttctcagggaggcagagaatccactgagacatacgtagtgtgcgttcagtccctgatgtaccagagctcagtatttcctgcttccttcttgtgagaccctctctgcctccagggatcaaggagaagaaagaatctccccagacactccaaaatccctttggagatgctacccgcgaattagtacatgttttcttggtaattataacagggaaataaaagttttaaaaatataatagcgtcctggctgggcacggtggctcacgcctgtaatcccagcactttgggaggccaaggcgggaggatcacgggtcaggagatcgagaccatcctggctaacatggtgaaaccccttctctactgaaaatagaaaaaattagccgggcgtggtggcgggtgcctgtagtcccagctattcgggccactgcattccagcctgggtgacagagtgagactccatctctaaataaataaataaaaatatagtagcatcctaggactgcactgtcatagctgtgacaggtaaaatgatcattgcggttgtgacagcaggtgagtacacagaaccacaatcccatatctagcagcctggctgctgccctctcatataatactgactggcatgaccagcacactgagctcaccatccagacagaaggatgggtgaggtgactgttttatacttcactttgacaggtagagtatggaatagaaggaggtatataagaagtccagatatggccgggcatcggggctcatgcccgtaatcctaacactttgggaggccaatggtggggggggcggtggatcacctgaggtcaggagttggagaccagcctgcccgacatggcaaaacccatctgtactaaaaatacaaaaattagccgggcttagtggtgggcccctgtaatcccagctactctggaggctgagacaggagaatcgctagaacctggggggcggaggttgctgtgagccgagatcactctacttcactccagcctgggcataagagcgaaactccgttgtgggaggaaaaaaaaaaaaaaaaaaaaagtccagataagtgatcacatcaagaaaagcgaatcttaggggtttgaaactagtttaatgtcaaagccacacaggaaggaggaataattcctgaggcatgagttgagccaggaaagagagttggggactgtagaccctataccagtccctgatagctcctaatgtagtttagtttaatccttcaataataatgatttttttggtgtttaatccacatgataatgaaacctgggttttaaggtgcttgaagactggaattctaaaatctatctgtggttcagcctactttacacaaatcatagaaagagttttaaggataattagaagtatgcccttatgacccacatactggaaatgattgggataaatctacaagaattacctaattctgtgcagaatccacaccctcaagtggcagttctggggctagaaatgttatctcaaagtctcctctttgaagggctaaatggagagtcattgtttctctattgaaaacataaggagtctgttgattatggtgagactcttttcagtcttgaagttaggaaggcaacatttagggaacaggaaagttttaataatcagttttagatagcagttgtcagtcttgaattgtaatgctgttgtctggcttaaaagaaagtctaatatccggctctgatcacaacaattcggtaagttggtgaggtgatgcatacgttaattagcttgattgaatctttctacaatgtatacagagatcaaaacatcccattatatcccctaaatagacacaattattggccaattaaaaataaataaatgtggccggggcagtggctcacacctgtaatcccagcactttaggaggccgaggcgggtggatcacctgaggtcaggagttcgagaccagcctggccaacatggcgaaaccccatctccactaaaactacaaacgattacctgggcatggtggcaggcgcctgtaatcccagctagttgagaggatgaagcagggagaatttcttgaacccaggaaggcgaaggttgtggtgagccgagaccatgccactgcactccagcctgggcaacacagccagattccgtctcaaaaataataataaaataaataaataaatgtggccgggtgcagtggctcatgcctgtaatcccagcactttgggagaccgaggcgggcagatcacaaggtcaggagattgagaccaccctggccaacttggtgaatccccatctctactaaaaatacaaaaattagcttggcgtggtggcgcatgcctgtaatcccagctactcaggaggctgaggcaggagaaatgcttaaaccagggagtcagaagttgcggtgagccaagatcgcaccactgcactccagcctggtgacagagcaagtatccatctcaaaaaataaaatataaataaataaatgtaatcaaatccaaatctaccatttcagtttatcaaatgcacaagattccatgccttacagatttaattttttatatatgttctatattaacaccttttacaaaactcacctcaacacttattgttttactcaatttatgtattcattaattgatgagtatatgaactgaaaattgtggggaaaagaaggagagatcagactcttactgtgtctatgtagaaagaagtagacataagagactccattttgttctgtactaagaaaaattcctctgccttgaaatgctgttaatctgtaaccctagccccaaccctgtcattgcagagacgtatgctgtgttgactcaaggtttaatggatttagggctgtgcaggctgtgctttgttaaaaaagtgcttgcaggcagtatgcttggtaaaagtcatcgccattctccagtctcgagtacccagggacacaataccctgtggaaggccacagggacctctgcctaggaaagccaggtattgtccaaggtttctccccatgtgatagcctgagatatggcctcatgggaagggaaagacccctaccccgacacccataaagggtctgtgctgaggaggattagtgaaagaggaaggcctctttgcagttgagataagaggaaggcatctgtctccagctcatccctgggaatggaatgtctcagtgtaaaacctggttgtatgttctatttactgagataggagaaaaccgcctcagggctggaggtgagacatgctggcggcaatactgctctttactgcacagagatgtttgtgtacgtgcgcatcaaagcacagcacctttccttaaacttacttatgacagagacaccttcgctcacatgttttcctgctgaccctctccccactattaccctattgtcccgccacatccccctctcggagatggtagagatagtgatcaacaaatactgagggaactcagcaaccagtgctggcgcaggacctccttatgctgagtgccggtcccctgggcccactgttctttttctatactttgtctctgtctcttatttcttttctcagcctctcgtcccaactgacaagaaacatccacaggtgtagaggggctggcccccttcagaaaatagacataatttaattttatttatttattttttttttttgagacggagtttcactcttgttacccgggctggagtgcagtggcacgatcccggttcactgctacctctgccttctggtttcaagcaattctcctgcctcagcctccctagtagctgggcttacaggtgcctgccactattcctggctaatttttgtgttttagtagagatggggtttctccatgttggtcaggctggtctcaaactcccaacctcaggtgatccgcccacctttgcctcccaaagtgctgggattacaggcatgagccaccacgcccagccatgataatttaatttctaccctactttattttatgatgccctagtgtttcacgtcatgtagttaagacatgatatcagaatgtccattaattcctgtggtaggtgccatcgtactttccttcctggcataagaagaaatgagtctctgtgtggctgtcctgatatggggtcgactttttaaacctactttagtcatgaggcagattcctgtaattttatactccaatcagtgtatctacattttatcaaggtctttaaagatttattcataattggtatcagcctctggggtaatgttttacatgtcaatggaaaccggtgaaaaataaaattatgaaattaaatgtcacctgtgtaaaatataaagaccaggtataaaatagaaattaaatatgtatgttcattattggaagaaccccgctaactggctttgacagtagagcatggtggttaatgcactctgaaatcagcccagacaagatcagtccccattctaccccaaacatggtgtgaatttacacaaatcatgtcacctctctgtgcttgagtcctctttgtctttataatggtggtacctggctcatcgattatgaagaatatggaggtgaatacatgtctgttcttcacagcaaagagcaattcattgcaaatacacttaaaataggacacatccaaatatggcgaattcttcatactagaaagtaactttattatttctgttgcatttcagctgggtttatttttatttttatttttatatatttacttatttatttattttgagacggtgtcactttatcatccaggctggcgtgcagtggcgcgatcttgcctcactgcagcctcaacctcctgagttcaagggatcctcctacctcagcccccaccaagtaccagctgcctttttaatgtcactcatgcatcacgttccctgcaggatcctgtgtctctgaagataagtagcagcctgtgagaactgacagaatggctgctgggatgtggccatgggaatgatcttcttatcacagactgtacttggaatcctgggaatttctatcttatttaccattatctgtccttttacatcactgggtgcaggttaaggtccacagatttgatgatcagacacctaattgtagccaacacgttattcctcctccctagaggagtcccacagacaatggcagcttttgggtttaggcatttccggagtgattctggatgtaaatttcttttttgtgtccacagagttgtcaggggagtgtccattggcagcacctgcctcctgagtgtctcccaggccatcaccatcagccccaggagctcaggtgggcagagcttaaagggaacgcccccaagcacgctggctcctgtgtgttcctcagctggctcctccctggtcaatatcattgttctcatgcacgtgaccggcaagtggagcaacaaaaataccacgaagacaaaagatctgggatactgttctgctgctgatcacgagggcaccagagagtcgctgacgcggcactgctgtccttccctgatgtgatctgcctggggctcatgctctggggcagcagctccatcgtttgcatcctgcacaggcacaagcggcgggtccagcacattcataggaccagcgtgtcccccacatcctcccctgagtccggagctaccaaaaccatcctcctggtgagcacgtttgtgtccttttacactctctcttcacctttcaagtttgtttggctcttttgaataatcccagtcagctggtggtgaacatctctgcaatgatcagtgcaggtttcccaactgtcagccgctttcttctcatgagtggagactcctgtgtatccaagctttgctttgcttagataagtaacacaaaaccccctaatcttatcagaaatatgtgaattggacatgtttgtacaatgtttatgtttcttcattgatctctagagacccataaacacggttatgaaacgaggcttgttagtgctgtgcttgccagcaggggccactgttttattctgtacctcctgatcccccctccaaccacaccgccctggagcagctctgtggaaaaagtggaatcagcttagaggttttggagaggaagatactgaaacgtaaacgatataagaaagtcacggtgcacaaatatacatacctcatttctgtgtcccttggagcagatgggggaatgtgcgcagatgcgaagctcttgctgtaatttatgtgacaaataataaaatatatgttttgtcggatccagaaatctcatgccttcagccaacatccataaactgacagtctaacttgttggcttgtaagtaaggtaaaaatctaaaactggccaggcgcggtggctcacgcctgtaatcccagcactttggagggccgaagcagacggattaactgaggtcgagaatttgagaccagcctgacaaacatggagaaacctcatctctactaaaaaaaaaaaaaaaagaaaagaaaaaagaaaaaacattagccaggcatggtggcacttgcctgtaatccgagctacttgggaggctgaggcagcagaatcacttgaatccaggaggcggtggttgcggtgaaccgagatcgcgccacagcactccattctgtgtgacaagagtgatactctgtctcaaaaaaaaatctaaaacattttgcaatttctgatagttttggtgatgctgagacagatatgactttgtgtaagaggaaggtagaaagattcttcactggcgtggttagtaggcagaaaatggctctctggaacaagcagcgaattctcacccaaactgaggtgaaatgacagtaagacttctccattcttttttttttttttttttgagacggagtttcattcttgttgcctaggctggagtgcaatggtacgatctcggctcactgcaacctctgcctcccaggttcaagtgattctcctgcctcagcctcccaaatagctgggattacaggcatgcgccaccaagcctggctaattttgtattttttagtagagacggggtttcaccatgttgttcaggctggtctcaaactcttgacctcaggtgatccgcccacctcagcctcccaaagtgctgggataacaggcttgagccacagtgcccgaccaagattcctccattctataacccttgaatgggactgttgtgtgagagggaggattgaaatgaactgtccgaatgtgatttatctgttgctcattctcttcctggcaggagcaggaaaggacaaggagtccccgaagctgacactgagttcatggggttgagctgacagcggccaacaggctgtggtaaacgctaatgaaacgagccttgttagtgctgtgcttgccagcaggggtcactgtttccttctgtacctcctgatccctccctccacccacaccgcactgcagcagctctggggaaaaagtggaatcagcttagaagtttttgggaggaagacactgaaagtcctacttttttttttcagatgggatctcactctgtcggccaggctggaatgcaatggtgccaacttggctcagtgcaacctccccaccccgggctccaacaatcctcccatctcagcctctgaagtagctgggactacaggtgtgcctcatcaccatgggctatttttatttttgtattttgtagaggcaaggtcttgccatgtttctcaggctggtctcaaactcctgggctcaagtgatctgcccacttgggcctcccaaagtgctgggattacagacgtgagccaccgtacctggcctaaaactcttttactcctgttgcatgcaaggatttaagtcaccaacgtacgtggattccagcaagaagggtcagtagacgcaggggtgggtaaaggtgctaaggatggtggggtgaagtgtggctgcaaacaggcagaaagagacaagcttctgaccctgaatagtcaccaaatgctggatggtgcaatgctaagaatgcagcacaggccgggcgtggtggctcacacctgtaatcccagcgctttggaaagccaaggtgggtggatcatgaggtcaagagatcgaaaccatcctggccaacatggtgaaaccccgtctctactaaaaatacaaaaattagctgggcgtggtggcatctctttgtctgtgtctttatttattacaatctctcatctccgcatacaggcgttatctcctgtccggggaagaggtgggcctctctccgtcgtgggaggagctctgaacttctccttcatccagggatgggccccagggacccaccagtggggctgggagaagcccccctcagcaggaagacagaggtgcctgggtggccgaggcctggaaggtctgcaccatggtgcacagaggccccggagctgggtgaggccagaaagctgctctggggtcagcggggaatgtgcctgctgaatctgtacctgagctacgtcttcacaaatggcctcagacctagagtgcagggagatcccctggcttttctgaagtggtggcaggtggtctcctgggtagcaggatctgggctgcttacttcccttacccagtgagggcccgcggggagctcttaagttgggcatcatggggctgcgtgatgtggctgctgtgcccacatcagagggtttttgtttcttttccaaagtcaagctgcactaatctagaccagggatccccacccctgggctgcagaccggtccccatgggtggcctgttaggaactggaccgcacagcaggaggtgagcagtgggtgagtgcgcgtgaccacctgagctctgccttctgtgagatcagcagcgccactgcatctcagaggaatgccaaccctactgtgaactgtgcatgcgagggatctgggttgcatgctctttatgagatcaaactaatgcctgatgatctcaggtggaacagtttaatcctgaaaccatccccccatctgtggaaaaactgccttccactaaaccagtccctggtgccaaaaacactgggaaccgctaatctagacagttctctgctaaggaagcacgtggttgagaagcatcagaatcgttcccacggaccatgctccggagtctcagcaggctcctgcaggtgagccccactggcctctcctcttccttccggacctcctcagctttggtaatggaaagctgcatcctcttctgtccccagttcctctctgggtgtcaggatctctaaaaccctctcagccgctgagaagtctgtctgtctgtctcacagtgtgtttatccgtgcatcatgaaggaccctcatacggctgacgtgccttggctgatgcgaataacactgcagcaagcgtggcagtgcagatagctcttggaaatacccatttccttcagacgcatactcagaggtaggattgctggattgtttggtcattttgatttttaaaattaaaaagaattttaattctcatattgttttgagtaaaattaaattataacttgtaaggcaactccatgttttttagaatttttaagaaaaataattgctctaccaattgactgtcccaacaacaacgtacaggggtattttttttcctccgcatcctcaccacttgttaccttttgtctttttaataatagcaatcctaagacatgtgaagtgatacctcactgtgattttgattggcattttccagatgattagtctattcaggccctttacttttttttgttgttgttgttgtttttgagatggattctcactctgttgcccaggctggagtgcgatggcacgatctcggctcactgcaacctccgccttccggggaggcgtgattagccaccacgcccggctaacttttgtattttagtagagatgaggtttcaccatcttggccaggctggtctcgaccccctgatctcaggtgatccactttgcccagcctcccaaattgttgggattacaggtgtgagccaccacgcccagcccctttgctcttttttaatagggttattactattaccatatttgcttttgagttgtgagtgttccttatatattttggatataaactccttatcacaggtatggtatatatggtttgaaatattttctcccattatcatgccccaatatcactaagttacatttcactgctccctcttgaacacctgaaaaaatttcctatttccatgtgtctgtatccaggttattgtcacttttacctgaagacacatttatatatgctgatattccccaataactaatatatttttactcttttttttttttttgagatggagtcctgctctgtcacccaggctggagtgcagtggcatgatctcagctcactgcaacctctgcctcccaggttcaagtgattctccttcctcagcctcccaggttgctgggattacaggcacatgccaccaccactagctaatttttttgtatttttattagagatgcggtttcaccacatgggtcaggctggtcttgaactccggacgtcatatgatccacccgcccttggtctcccaaggtgctgggattataggcatgagccgctgcacccggccctaactaatatattttaaataactttttgctcttggcacatggactaaaaccacatcaccaggccttcaatgacgtccaatgtctgccatcttatttccactccagctccgccccaggcatagttgcctttctttttattgaagccttctccttgccaagttaattaaagagaatgttttcttcatcaaattagaaattacatcctcagagctttccagtatttgtagttcttacaggccacatttattacaagtttatagactccaaacttctccactgaacagttaataaaaaggacacaggcttattgtaaaataattcatttagtgcctgccattctgattacactagaaatttagttctcctgctcagcgttctgttatgtgactgttcaatgcattacttaaaactgcaagattgaatagagagatcagcttctgacactgatgaatgcaaaccacaagaaaccaagtctcctctgcaaaatgatgaaaacactcgcaaagtcactaaaatcaatcatttcagacttctgaaatttaccaaagccacagaacaaagtgaaaagtatctatcccacagaaagtaccaaacttcagtaagacagcagcatttgtgtcattttaatgtggaggcattaccattaccctccatccttcgttcagtgtagagcactgacctcttttgaagctccttttaaacacctcctatcaggccagtcgcggtggctcaagcctgtaatcccagcactttggacgacagagcgagactccatctgaaaaaaagaaagaaaaaaaaaagagaaagtgacttttcaagactgtgatttatggtctcccctgggaaccaacagtatctgtgctgagagcagatatttgggtggaaggggctctggtgtgcagggcatgccttctgtagctcagtgcttctgacaatgggtccgaggggagaaacattggcattaacagggaacttgttaaagatgccaatttataaatgctacctcaaacctgcagaatcaaacattattacagtgggttgtggagtgccagatgacttatattcaccttaaagcttgagagtcagtgcttagctaagaggctctcagcccaggcttccagttggatcaaatggtcatattcagttactaccatcacctgtgccctccccatagcgtctgtctattggtgtcgggggaaacatccatgctgtttcaattaactaccctgcccccaggtgattctagggtgaggagaagtccagcatgagggcttccatatgcatttgtgaaggttgatggcagactgttccaaatgagaataatggtttccgtgatatgataaaagcaatgctattgaatatgatgatgactgatgagaagttttgcatagcattcgctgtaaaaaagccacttataggctgggcacggtggctcacgcctgtaattccagcattttcggaggctgaggtgagcagatcaccggaggtcaagagttcaagaccagcctggctaacatggtgaaaccctgtctcaactaaaaatgcaaacattagccagatgtggtggtggatgcctgtaatcccagctacttgggaggctgaggcaggagaactgcttgaatctgagaggtgtaggttgcagtgagctgacatcatgcctctgcactccagcctgggtgagagagcaagactacgtccaaaaaaaaaaaaaaagagagagagaattttcctgtaaataattaaaaagactaagcagccccagagataagacctcctgggatcattgtccctttatattgagtgataaagtaaccttccttgaagtatatcaatccataaccaatcaccttgctgcaccctatgtactggtcttgaatggaaaatgtggtgattcttctaaagcttctctgtctttccgtgtgtgtgaaacctaagggaacgctgatcccattcatttggagttgatgtttccaggtggctatcctcatgctttgtgttcaaataaactctgtgcttaatcatatattctaaattttattatttactgctgatatcagtttctgtcagactgtaggagcctcaccagagagggcacctgtcgctatgttgtaaaactcacacttgtcagaaagacatgggttagtgttactccccgtccctcagaatgaagctaattagctgacacagatggtcacctccattaccaagtagagtcaggatgaactatgtgtgaccaagagtgttgtcaagtcctcttccctgaggactgattagcgtttatcttgaaaacatgtccttaatgggttgtatagaacagtaaagtttctttctcttttttcaacctcttagctgtttgcctgtatttcgcatcacaatctggtctaaggcttatttattaatgaaatggttttaatttctttctctatgatcatcgtggagatgatttctcatttggagaaagactttttgtttgttttcaattatattttctcaacaattagacagtgaagtaaaaagtattttgggggggccaggcacagtggctcacgcctgtaatcccagtactttgggaggccgaggcaggtggatcacttgaagtcaggaggttgagaccagctggccaacatggggaacccacctacaaaaatacaaaaattagccgggcatggtggcacgcgcctgtaatggcaggtactccggaggctgaggcaggggaatcgcttgaacccaggaggcagaggctgcagtgagcccagttcctgccactgcactccagcctgggcgacagagaaatgctctgtctcaaaataaaagaaaagaaataagtaaataaataaaagaaagtaatagatctcttctacaaatgtgctgggacaactaactggatatccacatggaaaagaataatgtatccctatctcacacaatcaaaattttattttaacgttaaaaaatggagaaaaaaagagagagagacgagggagggagtcctgagggaggggtgttactttgtcgcccaggctggcctggacccccaggctcagcgatcctctcgccgctgcttcctgagtagctgggaactcaggctcccgcccccgcgcctgaatccttgctgtgtttatccagcaggtcgcccctggctggcctgagcattccgtcccgcatcccagggggaggccctagggaagtctctgcagctgagcacggggtggactctccctcctgagtgagtggagaatagaaagggagaggatttctgttctgttctgtgggccgtcagcatgaaatcgtacgttccgcccaggcagggccttgcattttacattctagtttgtatcccgttccagacaattccagggcttttgagtccatgcgtcagccttcctgggcggtctcaccttcaccacccgaaaacaggtgctaggagagaagctgagaggagcaccggtcacgccccggccccgccctctgccggctctaaagcgcaaggtctctccgcctcgcgccccgcccctgcctcgtccaggccccgcccacctccttgcgggtcccgcccaggcctggcttctgctctgcgcgcgcagattcgtgcagaccaggaagcggatagcgtggagtgacggtgccaccgcggcgcgtgagtttcgccctgtcttgtattaagtctgctcttccaggttcctggcgcttctgtacctgggacttgggatccccacaaacctggaaattctcagccgtcttccttcactcagagcaaattgagacgacctcgtgagaggccgtgggtcggttccttttgggtttaaggtccccctgaggctggtcccgtcccgggtgtttctgctacagggcaatgtatacactttctaacctgtagttttcctgctgtaaacctttttctgactcctcccgccccgcgctttttaaagtcctcacctgagaggtggattctcgcctttgtcggcccctggagcccagcgccgctgccccagtcccggaaaggccgcgtcctctgcctggtcctaggatcctgcagaccccacccttgccttaaggtgctgtcgccccttcacctccctccttgtgccgggccctgctgctccacgggtttcgcctccacaatcaccgcttcccctgagcccgcgttggggaggtgcccggggcctgtcctgtgacgcggggtgttactgcctgcccagctccagcccctggaaaatgcgctcccccgggatgcaggcgtcttactccaaaccctcctgtgactgtgtgggccaaagggatcaggagacggacagagagcagtggaaaacctgagacagaaaagaagaatgagaaagacctataacagatggcaaagtagaggatgggtgagggatttgccaagagacagcaaaagtgaaaagaaaacgataagaaagcaggaggagaaaagcaagtgcagaaatgtagagaaaagctggatgtacagagagatgaaggacagcaaggtagggagagggacagcaaagagggaggctcatcagggtgagggagaggaggagggatttggagccagggcagacagagcagagtggtgctggtggcaaggagaacagagggagaagcacagcagggaggacacctggggatctggggtgctagagagtggggacaggggggtataacagggaagagagaatttaacggggagagcaaaggaggcgcagagatggtgttgcgggaaactgaggactagacagactgatatgggggagacaaaaggatgtttatttaagatacgcaccggctcagtggatttacatctaaaaagctgagcatttcaacaaagacggagtggggttttttgctttcagaagcagaataaaagcagttaatcatataatgataggtcatgtaatctatagcatagcataacttgtgtccttccatagctggtggcctcgtagctgagttgaaagaaaaacaagaacagctaaatacacacatttgtcctttttttttttttcttcactcttgttctgggaaggtggggggctgtctggagcccatttctttggcttcgacttcgccaagtcgagcttgctaggcagaggaaaacttgttcttcttttctttttaacccttgccttgcctgttacttttcttggagtgaatgaatgcatgtttgttttttaactttctgcctcagttttctcccttagatgccttttatgaacaagattttactagaagacatcactattactggattcttcatgaaagagcactggctgatatttatatcgggctattagctgagtggtagtctgcctggtcgcaattgcttctatagttgattgaatgctcttaacacggagaggtaagaggtaagggagtatcaaaccaattcttagtatggctagaactactcctattaaggttttgaatctactgaaggaggaaaaccagcctctaaagacggactcaagagtctattttgtctaagtccggactggaacgtgggctaattttttcattcttacagttatttctttaatagccttcctattgtcattgatttctaggcagcaattagttagattacactttctacatactcctccttcctaggctaggaggtagtctaaagctaatctattttggtagatggcatttctcgtttttgtggcttgctgggccagtaagtctaatgcatttgctgtttcattagtgatgatttcaagtactgcttgcgagtttatgatgcggttaagtgtgtaaattggggtgcaataccttcgtgacttatcttgtgcccaggtagctggcctagagtactgaattagtctttcaggaggcaaatctgtgtctttctaatcttctatttctatgtatttccttatgtctatatatcttttgtttttttctttaattttattgtagacaggataccttcaagtttctccctgttgcagtgggagtaagaagaaagatggtctaattgtttcaagtacactagcccttgtccattttcctggcaactgtcggtaggcctgtggcccacagatccaatagagaccagagggtgcttgccaggtatttggagcttcaagctgatactaggtgtggtttagagaagagaaacaggagaatgggtttggatgaggtgatctggagtcatctttgccttgccacaaagttttctttagtgttttattataatattgctgtcttaaacaagttaattcttccagtgagtctgtaaaagcttttccttagtgagcaacccagtatctcctgataatagaagtttttaagagctaggtgcttgaacttgtgggcatcggttcgggggaagagtcagttagagttaaattatcttgtggcattaactcttttgcttcttaaggccattggtctactatgttcgtccttctacaaacaacatgaggaaatgcttaagctgctagcaatcaatgttttcagctaaccaagcaaacaggtttttagctaaaggatgatgctctggtaacttctggtctacatgcttatggaatgatttaaagactcggaattgttgctggtccgggttcctttttgataacatataggtaggttgctgggtaggtgtgtgtggagacacgtatggggtaacctgcagtccgcatgggtaagtctggctttagaatggtgaaatttacaggattacaggttggacaagcatcaaaatacagagaaataggccatcggtaaaagggggggaccttggtttggtttaagaggtgactttcttttgaccttgcacgaatttaaactattcaccaggtgaaatcttggggttataacatacataaggttggttatttcctggtcacaaattgagtaactgagtaggtcgtctggctataaatacaagtccttttttttttttttttttttttttttttttttgagatggagttttgctcttgttgcccagtctggagtgcaatggcatgaccacggctcaccacaacctccacctcctgggttcaagcgattctcctgcctcagcctcctgaaaggctgtgattacaggcatgcgccaccatgcctgtttaattttgtatttttattcaatacggggttctccatgttggtgaggctggtctcgaactcccgacctcaggtgatccacccatcgtggcctccaaaagggctggaattacaggcatgagcaactgtgcctggcctttataagtacaagttcttaagtgagtccttgtacactcataataagtatggtgcagtagagtcttagttatcctgttccctgaccaggtagtatgtgtacagtggggacacatttctatagttgcttcttctaccatggttaaggggggtgacaacagcaaaacagtgtacagcatgttcatatccagcaaggacagaagagggccttgcctggcagaggaggttgagcacaacgacagaacaataataaaacagttagtattacaaggaaaactactagtcttaagatttctaaccacatttacttgcttgacgagtcctcaagcttcggccgtgcgtagactagtcagcttctggtgtgtgactagagctgggcttgtcgtcccctccagcttcagctgtgcatagactggtcagcctccagagtgaccagagcagggctgtcgtcctcagcagcagcttggtctcatctcaggatcggctgagttggatgatctgggtcttgctggctgttccacttgtcctgaactgctggtttcagctgactgtggtggacctatggcatgattcctgcaaatttaacagcagtgggagtggacaagattacagtacagggcccatcctatatgagtcctagagaagttggattctactttttaacctaaacagagtctccatgttgaaaggggtgtacttgatctgtcagacttataggcattctttcttgtattcagttatggacttcttgcatggctgttcttaaagcctgcatttgcttgcttaaagttaattcctctagttcttggagatcacctttaatttgacttatgattagggcaggccgactgaacaaactctaataaggtgaatacctagtttgtttggtgggggtgcacctgacttggaggaggaccatacgaaagagctgatcttatctcagatgagtttcttggcagtatttcttcagtagctgcttgagtgtccagttcatgcgctttactttccttgaactttgtgactgatagtctgtgtgtagcttctattttatttttagcagacttgtgaaatcttacactatttcagctacgaatgctggcccattgtctgactttaaaggtagagccagtccaaacctggggataatgtcttttatcagtactttagtcacttcttgcacttttcccctggtggagaaagccttaacttatcttgaaaaggtgcaaataagcaatagcatatacccatagcctctggcacggggcagttcgctaaagtttataagcaagttttcacaaggcacggctcctacttcttgaattcttggggctgagtgggcccctgtcgtgggttattctcagcacaggttaatcattgttcacaaacatcttgagtgacagcagagagccacggcacatagaaatggcactttcgtgacccagcgcagtggctcatgcctgtaatcccagtactttgggaggctgaggcaggcagattatgaggtccagatttgaagaccagtctgaccaacatggtgacaacccatctctactaaaaatacaaaaaaaatagccagtcgtgttggcaggcgcctgtaatcccacctactagggaggctgaagcaaaagaaacacttgaacctgggaagcagaggttgcagtgagccaagatcgcaccactgcactccaacctgggcgacagagcaagactccatctcaaaaaaaaaaaaagaaaaaatggcactacataacgttgctaatgctgtttttcttatatgattttcttgatggatttgcttcacaaacttaggagctaacatctttggaatggctagtctcctatagaagaacttcttttactttcttttcatacattttatatcttcttggcacaccaggatctttgatttggagtataacttgggtcgtcttggagaggaggttctgggaggagaggcatagctaaggcttcctctttaaaatgcagcgtgatcattgctgcctgctttgcctccctgtctgcttttctgtttcctttggcttctggcatccttgccttttggtggcctctgcaatgcattatagctactttttctggaagctatacagcctctaagtgctgtagaatctcttctttgtactttatttcttgcctctagctgataaaagtcctttctctttatatatagttccatgtacatgcaaggtagtaaaagcatacttagaattagtgtaaatactgactttcttctcttttgctagcaacagtgctcttgtcagggctattaattctgccttttgagctgatgttccggtaggcagaggctgagcctctactactgagtctgatgttaccactgtatacctggcatgtccaaactcttccagcacagaactacttccacctgtgaagtacttgacatctgggtctctgaggggtctgtctgtaagatctttctcattgggaaatacctcgtctactgttttgacacagttatggagaagagctgcctgttcgactgggagcagaatagccaggttagggtgtttagtgttctaaagttgtgtaagggttttcacatagaagcccttggtaccaagtcatcctcaggtttgataactaatggtgccttctttgatccatcaaagttatgactgaatgtggcaccgggacagttagttgctgtcctagagttaatttgctagcttcttgtgttaacaagatggtggcagctaatgccttaaggcaaagaggccatcttaacaccatggagtctagttgttgggataaatatgccactgggtgacgccatgatcctataagttgagtcagagcccctatagtcattgttttttgttcatgaacatatagaaagacttagttatgtctcatagtcttaaggctggggcctgggttaaagcttccttgatctgtttgaaggctatttcttggttagttttttaaaagaggggctccttttcccctccttttgtggcgtcatataacagcttagccatcagtgaaaaacttggaatccagatgtggcagaatgttgctgcgtctaaaaattcctatttgtcatcgggtagtcggagttagaagtgcacaaatggcttgcttcctctcatagccaaaccagtgttcctcgtggctcaatatgacacctagatatgtaacctcttcatggaaaatttgggctttcttttttgatattttgtaacttgctttctataggagatggaggagatcctgggttccccgataacactcctctcaggttggggcaggcaaagaaagctcgtctatgtactgcaacaaggcacagttgttacttggcagggtataggccatgaggtctgaggccaatgtttctctaaagattgtgggagagaacggggcatggtggtttgcgcctctcatcccaacactttgggcggccacatggctggatcatgaggtcaggagtccaagaccagactggccaagatggtgaaaccctgtctttaccaaaaatacaaaaattaggcagccatggtggcaggcgcctgtaatcccagctacccaggaggcaaaggcaggagaattgcttgaaccgagggggcagaggttgcagtgagctgagatcgtgccactacactctagccttggtgacagaacaagactctgactcaaaaaaaaaaaaaaaagattgtggtagttgtttttgttgttgttgttgtttttgagatggagtcttgctctgtcacccaggcgggagtgcactggcgtggtctcggctcactgtaagctctgcctccctggttcacgccattctcctgcctcagcctcccgaataggtgggaccacaggcccccagattgtggtagtttttaaacctttgtgggagtctagtccaggagagctgtgacgcttcttttctcttatgaaatgcaaagataggctgactaactggtgccagacagataacaaaagaaagaaagcatcctttaagtctaagactgtaagctagcacttgctggaataagagctatcaaagtatacgggttgggtaccactggatggatagttactgtggcctggtttatagcatgcaaatattgcactggcctgtattcatttgaacctggccctggcaatggcttctgaactggcaaaagcagagtgttctaaggcgactggcattggactaaaatcttatgtttatagagccgttctaaatgcttgcagatgccctgtacagacttttggggaactgggtactgatgaacccgaacaggagttgcttctggttttaattctgctactactggtgcatgatttacagctaaaccaggtgggttgtcctcagcctatactccaggaatttctttagctaactgaaataatgatttttgttcttcttgcatatgaggttgcactggtacctgaaaaagaggctgggtgctgtggctcactcctataatcccaccattttcagagactggggcaagggcattgcttgagtacaggagttcgagaccagcctgggcaacatagtgagacccccccgtcttggccaaaaataaataaataaataaaatgaaccaggcatgatggtgcacacctgtgctcccaattactctggaggccaaggcaggaagatcacttgagcccaggaagtccaggctgctgtcagctgagatcatgccactgcactccagcctggtcaacagagtgagaccctgtctcaaaagaataaaaggggtgggggactttgggttcagatgagtgggtgagttcactgggtatgattacttgtgacatgttgacttctgtgtatataatctaataacttaaaatttgtttaaattatacagatgagattgagaacttaaaaattcctatctataaggcatgtacattgtataaatcttggcatagaggtcagcttccacttggaatccctattcagccagagggcagtgacttattcagttgtgaattactctgttccctttttgcaggatggggtaggaagtggggcaatgaagtgggaaaaaaatctatttctgttattacataatacttttaattaaattaattaataattagtattttgagacagggctggctctatcgcccaggatggagtgcagcatgatctcttctaactgcagcctcgacctcctgggctcaaaccatcctcctacctcagcttcctgagtagctaaggtcacaggcatgagccaccaagtcaggcaagttttgtacatttttggtagaaacgcgtttcactacgtttcccaggctggtctcaacatcctgagctcgaaggatcttcctgccttggcctcccaaaatactgggattacaaggataagccaccacacctggtctacatagtacttttcaaaagggatatcaaaacgtggtggcccctgccattaaccacagcactttgggagacagaggcgagtgggtcacctaaggtgaggagttcaagagcagcctggccaacatggtgaaacctggtctctgctaaaaatacaaaagttagccaggcatggtggtgtgcacctgtagtcatagctactggggaggctgaggcatgagaatcacttaaacttgggaggtagtggttgcagtgagcaaaaatcctgccactgcactgcagcctgggtggcagagcaagtctccatctcacaaaaacaagcaaacaaaaaataaaaaacaaaagggacatcaaaagtgcttttgttttcatgtgtaatagatttactttattttatttctgtttcttcaattctttattttacttatttatttattttgcagtttgagacaaatgttagtttcgggtttttttgttttttgtttttttttttttggcagaatctcacgcagtcacccaggctggagtgtagtggcatgatgtcggttcactgcaacctctgcctcctggtttcaagtgattcttttgcctcaacctcctgagtatgtgggactacagtcccgcaccaccacacccagctaatttttgtacttttagcagagatggggtttcaccatgttggccaggctggccttgaactcctgacctcaggtgatccactcgccttggcctccccaaagtgctgggattacaggcatgaatgaccatgcccggctgagataaatcttagttttcaaaatttcttttttaattcataatcacagagaggagtctgcaatgccgagtggaggaaggaggaaccggagtgtgagcagtagctgggtgggcagcatggctgggatcaccaccatcgaggcagtgaagcgcaagatccaggttctgcagcaccaggcagatgatgcagaggagtgagctgagcacctccagtgagaagctgagggaaaaaggtgggcctgggaacaggcagaggctgaagtggcctccgtgaacggtaggatccagctggttgaagaggagctggactgtgctcaggagcgcctggccactgccctgcaaaagctggaagaagcgggaaaagctgctgatgagagtgagagagatacaaaggttattgaaatctgggccttaaaagatgaagaagatggaactccaggaaatccaactcaaagaagctaagcacattgcagatgaggcagatgggaagtatgaagaggtggctcgtaagttggtgatcattgaaggagacatgggatgcacagaggaacgagctgagctggcagagtcccgttgctgagagatggatgagcagatcagactgatggaccagaacctgaagtgtctgagtgcagctgaagaaaagtactctcaaaaagaagacaaatgtgaggaagagatgaagattcttactgataatctcaaggaggcagagacccatgctgagttggctgagagatcagtagccaagctggaaaagacaattgatgacttggaagataaactgaaatgcaccaaagaggaacacctctgtacacaaaggatgctggaccagactttgcttgacctgaatgagatgtagaatgccccagtcccaccctgctgctgctccttcctctgaccctgactctgcctgaggccagcctgcccgaagctgacctttacctgagggctgatctttaacgggaaggctgctttctccttttgccaccccctccttccctgcctctttttcaccaaactgtctctgcctcttcctggagattccagctgggctagaggctgagaacctttgcaaacaacatttaagggaatgtgagcccaatgcataatgtctttaaaaatcatgttgtgaaaaaaaaaatacataatcacttctgaaagatgcctttgtcacatcctataatcagctcacatcatttttttctgtacaagtatattttccagttatttacctgttgaccccagaatttgttagatttttaaaaaaacaatttctaaatagtttctgtttgaaactagttgcgtccagttcagatcaaggtctgcatgctttctagtctttattatttattggaaaacttcggtacctaatacaaaagtttgattgtttcagtgtgtacctggtaaagaatcagtgaccttttaccttaacatcaaaatgtagtttaaccagttaatgtatttttcagttttctttccttatgt[267 bp omitted]agtgatcaaacaaagcagcaggtggtgaggatgtggggtttgaaaggaagcagtgcatcaagcacatgatctataggtgtgtcaggttaacatttatatggaacatgttctgctacttgagatcatggggaacatattcttctagtttaagatacaatcattttatgagtctgggagtgctagaagcaaagaaccatcaagtctaggcacattccagaggccacgaggggttttatgccctgaaacctggattccatccaagccacaaggggtttgttggggaaagaaagagagatcagactgttactgtgcctatgtggaaagaagaagacataagaaactccattttgttctgtactaagaaaaattcttctgccttgagatgctgttaatctgtaaccctagccccaaccctgtgctcacagaaacgtactgtgttgattcaaggtttaatggatttagggctgtgcaggatgtgctttgtttaaaatgtgtttgcaggcagtatgcttggtaaaagtcatcaccattctccagtctcaaataccaagggacacaatgcactgcagaaggccacagggacctctgccccagaaagcctgggtattgtccaaggtttctgcctgctgagacagcctgagatatggcctcatgggaagggaaagacctgactgtcccccagcccaacacccgtaaagagtctgtgctgaggaggattagtgaaagaggaagacctctttgcagttgagataagaggaaggcatctgtctcctgctcgtcctggcaatggaacgtctcgctgtaaaacctgattgtacattctatttactgagataggagaaaaccgccttatggctggaggtgagacatgctggcggcaatactgctctttactgcactgagatgtttgtgtaaagtcaaacataaacctggcctacatgcacattgaggcacagcacctttccttaaacttatttatgacacagagacctttgcttacgttttcctgctgaccctctccccaccattagcctgtagtcctgccacattcccctcactgagatggtagagagagtgatcaataaatactgagggaactcagagaccagtgccgatgcgggtcctccgtatgctgagcgccggtcctctgggcccagtgttctttctctatactttgtctctgtgtcttatttcttttctcagtctcttatcccagctgatgagaaatagccacaggtgtggagggactggccccccttcagggttttatgccttgggcttaggttgtaatttggcagggcagccttccaccctttggcacagagctgggtgttccaaagaccacaaggggttttaggccctggaccccggcatgttccaagactctttatattatgtcagactagcaagccctgcctcagcttttccccaacatggaacgctgttctaaaagcacccatgattcttttttttcttttttttcttttttttttttttcagatggagtttcgctcttgttgctcaggctggagtgcaatggtgtgatctcggctcactgcaacctccgcctcccgggttcaagcgattctcctgcctcagcctctcgagtagctgagattacaggcatgatccattgctcccagccacccatgtattcctgattgaaaaaatttgcttatgtcttagttctacagctgaccctctttcgctattttcaaggtcaatagctgtgtgttcacacttctgcattttataaatgttactgtgattttcttctaaggaaaaattaaatgtcaggaatcagtggcatcagaaccttgcaaaagaagtttctttagcccaggcctgtgaaagatgcttctgtaattttcaaggataggggtgataaagaccaagccttcccattagcccttccaggcccccatgtaagaattcaggcacaccttctcactcatctcagaccttctcagggtaacttggtgaaaatttccctgctctgagccccagtgagcctccctgcaacttggagatgaggggctagaccagaaaagctcaacccgagtgacccagtcccctgaaatgatcggcaaaatagtgcatgtcttggcgtggcctttcttctggcagaggggagtgcccagctgtaattagaattttaaatgggatgcagtaccccaaaaataaaattaaaaaaaattttttaaaaaaacgtgaaagaatggaagaaatagaggtgtagactcagacacagagaccatcttcgaggcctttctctgtatgaggacatcacagcaaaatctaaagcaggtcacgtcagtccctggcagggaaccctccaccagcttcccgtgttccccagaacaaaagcccaactcctcactgtggctccacagccctgtgaccagggcccctgccagtgtccagcctcctcctgggagcttgccctcatctcatgactccctctgccccagtcacatttgcttttctgttttcccagatatcaaaacccttcctgtctcaggttgctgtccctgctcttaccctatgtccctaaatgatcacggccctgtgcctttcttcttcaggtctaggctcagagatgtctcccatgccctcccaaccccatctgaagttccctctgcccatcagtctctatcatgttactcaggttttattatctctacatcaatcacatcagaatttttttttcttttttttggagacagagtattgcccgggctgtgagtgcagtctcatgatcttgggtcactgcaacctctgtttcctgggttcaagtgattcttgtgcctcagcatcccacgtagctgagattacaggtatgtgctaccacacctggctaattattgtatttttatttttatatatttttttatttttgagtctcacactgtcaccccagactgaagtgcaatggcatgatcttggctcagtgcaactgccacctcctgggttcaagcgattctcctgcctccacttcctgagtagctgggattacaaacaaccaccaagcccagttactttttgtatttttagtagagatggggtttcactgtgttggcaaggctggtctcaaacttctgacctcaagtaatccaccctcctcagccttccagagtgctggtattacagacataagccaccaagcctggctcagtttttttatttttcgtagagacagggtttcacagtgttggccaggctggtctcaaactcctgagcccaagtgatcttcacacctcagactcctaagtagcttggacaaccatgcctggctaagtttttgtatttttggtagagatggggtttcaccatgtttcaccaaactcctgagctcaagagatctatctgcctcagcctcccagagtgctgggatgacaggcatgaggcaccagacccagcatctgcatggggtttggtcagggctgggtctagggacccagggctgggtcaggaaggggagcccattccagcccagctcccactgttgcagcgtgtgtgtgggctcctctaggaaagaagtgcgagttttcctgtggcagtttatcatccctggtgcagtgggcagcagacgggaccatatttcccagggtgaggtcgcctttgtatgtgtggttgtgttccacggaggtggcgtgttgattctgagcaataaacaacatatttctaacattcaggattgacttctaaagactcttggtacgtgaggaagaaacccggaagaggaagaggagagcaaaggagtcagggatggctttttctcaggtgagatgatattttcagtggattgttctgtctccttcctttcagaaatgctgggccttggagttgggaatcttctctgagtctgaagcatcctgcctgacaggtttgctcacattcacccatgccttccctcagtccctcttatctcgcttagattccatctctcgtgatccagtgagatgaacttgggaagaggctgcactgggcatggtcttgggaagggctcacacccagacatggatggagacggggtgagggtcccatggtgtcagtgctgttggacagcagggattgttcaggggccacatctggacgtactgtcagctctctgtggaccagtattagagcagctgccaatggaagtcatgtattcatgtgcacaaagtatgtggtaaattctagaaaaggtgaccaagatcgagaaatgttttctgcctgattttataatacatttttagttttttgagtgagttactgtgtttctgactccaaaaatcttagtaattagaatggaaagttcatacacagacatgaaagatagaagatgttttattctgtcattattttaagaataggaaatcaacctgaacaatagcaggagattcattaaaccattcttagcacattacgctcatggagactgtggtgttaccgtggagaggcttgtgaaacaggtgttttcattaaacgtttttataatttttattattatgttatgataatattatattttaaatatgcagagtcttgctctgtcacccaggctgaagtgcagtggcatgatcttggctcacgggaacctccaccttccgggttcaagtgattctcctgcctcagcctcccaagtagctgggattataggcgtgcgtcaccacgcccagctaattttgttgtatttttattagcgacgggtatcaccatgttggccaggctggtctcgaactgctgatctcaggtgatctgcccaccgcagtctcccagagtgctgggattacaggtgtgaggcaccatgcccagccccaccaattattattaaatacatatttttatatttaaccatcacatgatgtatccatttgttttgtggtaaaactccaagcaaagctgcagcttagattttttgccataatgcatctcctttccctgtcacgtcctccaccctccttccagcctcactggggagccactactgtcagttctgtgccaggtgtcagagcaagtcccgttcacgtgtatttctacatcgttatgagacttatgagatgatatcgttatgagatataatcgatgagatataatggatttccatactttgactaatctagttttcatatattttcttttgagactgggtctcactgtggtgcccaggctggagcacagtgacgtgatcttagctcactgcaacctccaccctaaggctcaagccatcctcctacctcaggctcccaagtagctggaaccacaggtgcctgccaccatggctagctaatttttttttttttttttttgagatatagtctctgttgcccaggctggagtgcagtggtgggatttcagatcattgcaacctctgcctcctgggatcaagcaattctcctgcatcagcctcccatgtagctgggataacaggcatgtgccgctgtgcccagccagattttagtttctcatctttcactgtgaatgttgtcatctctgaagacatcacccgtactctgtctcatctagatacggaatgtcacttgctgtgtcaataaaagtttctgggccgggcgcggtggatcacgcatgtaattccagcactttgagaggctgagtcaggcagatcacgaggtcaggagtttgagaccaacctggctattacggtgaaaccccgtttctgctaaaaatacaaaaattaactggttgtggtggcatgcacctgtaatttcagctactcaggaggctaaggcaggaaaatcgcttgatcctaggaggtggaggttgcagtgagcgcagacagcaccagtgcactccagcctgggtgacagactgagactccacctcaaaaaaaaaaaattttagtaaaacacaactgggaagacaaaatgcggtgaaaaatcccttactcagatttgttagaacattcactgcatttaaatccatgccttcacctctcttcttctcattttctgtaaagataagaactcctctcataaccatttggttaaaatgtgttttcatttcagggtctattgacattcagggatgtggccatagaattctctcaggaggagtggaaatgcctggaccctgctcagaggactctatacagggacgtgatgctggagaattataggaacctggtctccctgggtgaggataacttccctccagaagtgggaatgtgcccttgtgtatctttgtattttctcttgtttttagatacagtgtcttgctctgtcacccagggtagagtgcaatggtgtgatcatggctcactgcagtcttgaattccttggctcaagtgattgtcccacctcagcctcccccggtagctggtacaggtgcatgccaccatgtttgggcaaattttttagtttgttttctttccagacagggtcttgctgtgttgttgaaattcatcttgatctcctgagctcaagagatcctcctcagtctcccaagtagctgagattacaggtgccaaccaccatacctaattattggcttttatttttaagatttttgcatatgtgtggccgggcttggtggctcacgcctgtaatcccagcactttgggaggccaaggtgggtggatcacgaggtcaggcgatcgagaccagcccggccaacatggtgaaaccccgtctctactaaaaatagaaaaattagccgggtgtggtggcatgggcctgtaatcccagctacttgggaggctgaagcaggaggatcacatgaacctgggaatcggaggttgcagtgagccaagatcaccactgcacatctgcctggtgacagagtgagactccatctcaaaaaaataaataaaataaaatgaaatatttgcatatgtgtgtccttaaggctaatatgagtctatgagtttcttgtagacaacatgtagttggttcctattgattcagccagtctttggtttctgaatgcagagttacttacagtggaagtattactgatggagaagaccttacccttgtgattttgttacatattatctgtgtttcttgtaggttttttttgttcttcatttctcatttactactttttgtgtttaattgcttttttgtgtagacatgctttgactcccttcttttatttacttcttttgtttgtttgtttatgatggagtctcactctgtcgccaaggctacagttcagtggtacgatcttggctcaccgcagccagctccgcctctcgggttcaaatgtttcttgtgccccagtggctcacgcctgtaatcccagcactttgggaggctgaggcaggcaaatcacctgaggtcaggagttcaaaaccagcctgcctaacatggcgaaactccatctctactaaaatacaaaaattagccggacactgtgatgggcgcctgtaatcctgctactcaagtgtctaatgcaggagagtcacttgaacccaggaggtggaggttgcagtgagccgattgcaccactgcactccagcctgggcgatagcacgagactctgtctcaaaaaaaaaaaaaaaaattccataacctgcaaaaactatttctccactagaactctgtatttatgtcagaattatttctgtgtatgttgcactttcatcaacctatatggatactgtgttttcatgcttttttcttctaaataggaaaaaaagttgaattatgaagaaaaggtacacttataacagtttatgtgtccttttatttgcctgttcatttatttatttatttgttgatgagatgaagttttgttcttgtcgcccatgctggagtgcaatggcacaatctcgggtcactccaacctccaactcccaggttcaagcaattctcctgcctcagtgtcatgagtagctgggattacagatgtgtgccaccacgcctggctaattttgtattttaatagacacaggctttctcctttttggttaggcaggtcagaaacccctgccctcaactgatccaccaacctcggcctcctaaactgctggattacaggttgaaccaccgcacccagcctgtctgtctttttatttacctttactggagaactttatatatatctgtgggttggagttactctttagacttctttcatttctttcttttttttaagatggagtctcggtctgtcacccaggctggagtgcggtggtgcgacctcagctaactgcaacctctccctcccaggttcaagtgattctcctgcttcagtctcccaggtagctgggactacaggcacatgccaccacacccggctaattttttttttttttttttttttagaaacggggtttcaccgtgtgaaccaggatggtctcgatctcctgacctcgtgatcctcctgcctcagcctcccaaagtgctgggattacaggtgtgaaccaccatgcctggccagcctcaaagtttttaaaacatgttattgctattagatggcttcaagtattgttaagatttatagtacaggctctaaacttcctttgtttaatcagatttttcagccctcggtgatgttgatgagatgctcctgttcctgtctcagtcatttcactgtcctgtcagaaatagcttagactggccacccgaggtggctcatacctctaatcccaacagtttcggatgccaaggtgggctgatcacttgaaatcaggagtttgagaccagtctggccaacatggtgaaacctcgaatctactaaatacaagaaattggccagttgtggtggctcaagcctgtaatcccagcactttgggaggctgagaggggcagatcacctgatttcaggagttcgaggccagcctggccaacgtggtgaaaccctgtctctaccaaaaatacaaaaattagctgggcatgctggcgcatggctgttatcccaagtactcactaggctgaggcaggagaatcacttgaacctgggaggtggaggttgcagtgagccaacattgccccactacactccagtccaggtgacaaagtaagactcgggctgaggcgggagaatctcttgaggcaggagaatcatgccactacactccaatgtgggtgacagagtgtgactcggtctcaaacacaaacaaaaagagaaatagcttaaactgggaggcttcagacacagaaatttatttctcatgaatttggaaagtgggaaatccaagagcaaggtgccagccaaattggttcctggtgagagcattcttcatggtttagcccagccatcttcctgccgtgtcctgacatggtggaaacaggaacaggcaacgagctctttaatatctctttttatgaaagcacaagtcctattcacgagtagtcaacacccgtgaccaaattgtctcaaaggccccatctgcagaacatccttttggagaataagaactctgaacatggcttttggccaatatgaacattcagaccaggtagcctgcatcatattttttatgtttttattgtgcaatttgatttataaaatgttttctctgatcttagtttaaaatttttcccagtgcacattctgtgttttatattttgtgcatagtgagctagataattaaggtcaacaatgcacaggtgcaatctcggcttactacaacctccacttcctgggttcaaatgattctcctgcctcagccttccaagtagctgagattacaggcacccaccaccacgaccagctaatttttttgtatttttagtagagttgggatttcaccatgttggccaagctactctcgaactcctgacttcatgatccgcctgcctcagcctcccaaagtgctggtattacagaccgtgcccggctgttagtcaattcttattccttataatgctgtgcacttctttgacctcataaatcagatggtagtgatcttaacatgtatttcagtttttatattgtgtgctggttgtaagtagaagtttggcgtttttcttaatggaattgtttagaattttgcaggttgtataaatgtacttattctttgcttcctggttttatggattacaatattttactaattaatttttatgattgtacatgaggcttttcggtatgtggtatgcaatataactgacacagtccactagctaatgtcacacagtgccaccagatgctgtggctcacacctgccatcccaggactttgagaggttgaggcgggtggatcacttgaggtcaaaagtacgaggctggcctggccaacgtgttgaaaccctatttctactaaaaatacaaaaattagccaagcatggtggtgtgtgcctgtaatcccaggtactcaggaggctgaggcaggagaatggcttcaacccaaaaggtggatgttgcagtgagccgagatcaggccattgaactccagccagttgcaacagagtgaaacttcatctcaaaaatataaaaataaaaaaaatgttttaatgtcacaacgtgccttttcttcatggatataggtaattttatgacagttattcagaaaaacattgtattaactttttttttttttgaggtagagtctcactttgtcacccaggctgaagtacagtggtgaaatcttggctcactgcaacctctgccccttgggttcaaacaattcttgtgcctcagcctcccgagtagctgggactagatgtgggccaccacgcctggctacattttgtaatcttttcttgtcttctcagtgctatgactgtttgacaatacagaatttccattgattttggttatccttacatgagcttgttgtggattatttaccaatatagtatatcgtgtggtcctttagcatttatttgtatacagtaaatatgctgtaaatatgaagaatatatacttttcattgatatgacagtgatatgttttttacaaactgttagacactttagggtcacaatggaaaaatattccttactttaggctacacatgtttgtgccctgtcaatgttttgtcacgatcttggaaatagacttccgtaaaaataatttgaagcacatgtaatcgccctttatttgttaaagaatcttatgcttttctgttcctaaactttgagggtcatgtttggaaagtttaaaataactattgttttttgtgtcgtatttacacatttcagcattatttaccatctgtacttaatttgaaagctttcggtgtttatgttttgtagatatctcttccaaatgcacgatgaaggagttcttgtcaacagcgcaaggcaacagagaagtgttccatgcagggacattgcaaatacatgaaagtcatcacaatggagatttttgctaccaggatgttgataaagatattcatgactatgaatttcaatggcaagaagatgaaagaaatggccatgaagcacccatgacaaaaatcaaaaagttgacaggtattacagaacgatatgatcaaagtcatgctagaaacaagcctattaaagatcagcttggatcaagctttcattcgcatctgcctgaaatgcacatatttcagaccgaagagaaaattgataatcaagttgtgaagtctgtccacgatgcttccttggtttcaacagcccaaagaatttcttgtaggcccaaaacccatatatctaataaccatgggaataatttctggaattcttcattactcacacaaaaacaggaagtacacatgagagaaaaatctttccaatgtaatgagagtggcaaagcctttaattacagctcactcttaaggaaacatcagataatccatttagcagacaaatataaatgtgatgtatgtggcaagctctttaatcagaagcgaaacctagcatgccatcgtagatgtcacactggtgagaatccttacaagtgtaatgagtgtggcaagaccttcagtcagacgtcatcccttacatgccatcgtagacttcatactggagagaaaccttacaaatgtgaagaatgtgacaaagctttccatttcaaatcaatacttgaaagacataggataattcatactgaagagaaaccatataagtgtaatgagtgtggcaagacctttaggcagaagtcaatccttacacgccatcatcgacttcatactggagagaaaccttacaagtgtaatgagtgtggcaagacctttagtcacaagtcatcccttacatgccatcatagacttcatactggagagaaaccctacaaatgtaatgagtgtggcaagacctttagtcacaagtcatcccttacatgccatcgtagacttcatactggagagaaaccttacaaatgtgaagaatgtgacaaagcttacagtttcagatcaaattttgaaatacatcggaaaattcatactgaagacaatgcttacaagtgtaatgagtgtggaaagacctttagccggacatcatcccttacatgccatcgtagacgtcatactggagagcaaccttacaaatgtgaagaatgtgacaaagctttccgtttcaaatcaaaccttgaaagacataggagaattcatactggagagaaaccatacaagtgtaatgagtgtggcaagacctttagtcggaagtcatacctcacatgccatcatagacttcatactggagagaaagcttacaagtgtaatgagtgcggcaagacctttagttggaagtcatcccttacctgccatcgtagacttcattctggagagaaaccttacaagtgtaaggagtgtggcaagaccttcaatcagcagttaacccttaaacgccatcgtagacttcatagtggagagaacccttacaaatgtgaagatagtgacaaagcttacagtttcaaatcaaaccttgaaatacatcagaaaattcatactgaagagaatccttacaagtgtaatgagtgtggcaagaccttcagtcggacgtcatcccttacatgccatcgtagacttcataccggagagaaaccttacaaatgtgaagaatgtgacaaagctttccgtgtgaaatcaaaccttgaaggacataggagaattcatactggagagaaaccttacaagtgtaatgagtgtggcaagacctttagtcggaagtcatattttatatgccatcatagacttcatactggagagaaaccttataagtgtaatgagtgtggcaagaactttagtcagaagtcatcccttatatgccaccatagacttcatactggagagaaaccttacaagtgtaatgagtgtggcaagacctttagtcagaagtcaaaccttacatgccatcgtagacttcatactggagaaaaacaagtgtaatgaatgtggtgaggtttttaatcaacaagcacaccttgcaggtcatcatagaattcatactggggagaaaccttagaaatgtgaagcatgtgataaagtttacagtggcaaatcaagcctcagaagacaggagaattcatactggagagaaagcttataaatgtgaagaatgtcacaaagtttacagtcgcacatcaaaccgtgaaagacaggagaattcatactggagagaaaccataaaaatgtaagagtttgtgacaaggcttttgggcatgattcgcacctggcacaacatgctagaattcacactggagagaaaccttaccagtgtaatgagtgtggcaaagcctttagtaggcagtcaacacttgtttaccgtcaggcaatccatggtgtagggaaactttactaaggtaatgattgtcacaaagtcttcagtaatgctacaaccattgtgaatcactggagaatccataaggaagagagatcatactagggtaataaatgtggcagatttttcagacattgttcataccttgcagttcatcggtgaactcaacgctggagagaaaccttacaaatgtcatgactgtggcaaggtcttcagtcaagcttcatcctatgcaaaacataggagaattcatacaggagagaaacctcacatgtgtgatgatagtggcaaagccttcacttcacacctcatgagacatcagagaatgcatactggacagaaatcttacaaatgtcatcaatgtgccaaggtcttcagtctgagttcactccttgcagaatatgagaaaattcattttggaggtagttggtccatatgcaatgagtagagcaaaccatcaagcattaattgacattagggtcaattcagcattgacttgagtttgtattgacttaacattgagttcaagcattaattgacattagtgtttatgttaagaggattgggccaggcacatcagcttacacctgtaatctgagcgctttgggaggccaaggtgggtagatcacttgaggtcaggagtttgagatcagcctggccaacagacgtgagccattttcccagcctgttttttgtttctttaaaaaaactgatagggatttttatggatatcatgttgaatctaaatcacattgggttattatataatcatttcacaatattaatttttccaagctatcaatatgggttgtagctcaatgtttttaatcattttgatcaatgtttgtagatttcaaggtacaaacttctgacctttgtacgtttatttctaagtatttctttaagttctccagcaaatggaagtgttttaaaattttcttttaaaattgtttattgttaaagtatggaaattcaactaatttttggtgctgatactgtattgtgcaaatccactgactatgttacttagttccagtagtattttggttggctctttgtgattttctacacagaagattatgtcatctacaaacaaatataattttacttcttactttctgatttggatgagttttatttcctctgctatttcattgctctggctgggacagccagtattgattgaatagaaggggtgagagcattcttgcatcatgtgagagcctccaggaaaggcattacattttccctgcttgactgtttactcattggtcatttcatggacggtctttctattgttgaggtaaatttccttttctgtctattttgtttaggatttctatgatgactggattttgaattttgtgaaatgctttttctctattaagatgatgtggttttcatcttttgttctgttcaagtggtatatcacattgatttgcttgaatatgttgaaccatccttgcatcccagaaataagtggcacttgaatatctacatttttttaatgtcctcttgaatacagttttctagtacaatggatcttgaagaagttcatggaaaaatacctattatgagaaaatttgcatgaattttagtttttgcaacaaaacactggtacaagtctgttatgtctgaacaggctgtagtttaaggcactcagaaggataagacatgagtttgaaaagagactctatcaaagcaatataaattctgctaaaattgaaacaagaagaaacatcaaatttacgatgagatcagatgcagtgtctcaggtctataatcccagcactttcagaggccatgacaggtgggtcacatgagcccaggtattcaagacgagcctgggcaacatggtgaaacccccttgtctacaaaaaatacaaaaattagctgggcatggtggcatctgactgcagggccagctactgtggagtctgtggtggaggatggcttgagcctgggaggtcgaggctgcagtgagctgtggtcatgccactgcactccagcgtgggtgatggagtgagatactgtctcaataaaagaataattatgggccgggcggcgtggctcaatcctgtaatcccagcactttgggaggctgaggcgggtggatcatgaggtcaggagattgagaccatcctggctaacacggtgaaatcccgtctctactaaaaatacaaaaaaaaaaaaaaattagccgggcatgctggagggtgcctgtagtcccagctactcagggaggctgaggcaggagaacggcatgaacccgggaggcagaacttgcagtgagccgagatcatgccactgcactccagcctgggggacagagtgagactccgtctcaaaaaaacaacaacagcaacaacaaaattatggtaaagtttgggaagaggaataatggaatcattgatactttatgaaaaggttatggagatgatgcccaaaagaaataaaccatttgtaaatggataactcatttcgaattgggacaagacagtgttgaaggtgatgctaggagcggcaggcagatcacatcagttttttgttttgtttgtttgtttgctttgaggcagtgtctcgatctgttgcccaaaagctacgtagaggccaggcgcaatggctcatgactgtaatcccagcactttgggaggtggagacaggcaaatcaccttaggtcgggagttcaagaccagcctgaccaatatggcgataccctgtctctactaaaaatacaaaatgagccaggtgtggtggcgcatgcctgtaatcccagctactcgggaggctgagacagcgaaggggacctgcccctccacatctgtgggtattcctcatcagatgagagactgagaaaagaaataagacacagagacaaagtataaagaaagaacagtgggcccaggagactggcgctcaacatgcgaggacccgcactggcgctggtctgagttcccttagtatttattgatcactatttttactatcttggcgaggggagtgcggcagggcaacggggtgacggtagggagaaggtcagcagggaaacaagtgagcaaaggaatctgtatcatgaataagttcaaggaaaggtactgtggatgtgcacgtaggctagatttatgtttcactttacacaaacatctcagtgtagcaaagagtcacagagcagtattgctgccagcatatcgcctccagccatagggcagttttctcctatctcagaatagaacgaatggtcggctttacactgagacattccattcccagggatgagcaggagacagaagtcttcctcttatctcaactgcaaagaggcctccctctttcactactcctcctcagcacagaccctttacaggtgtcaggctgggggatggtaaggcctttcctttcccatgaggccatatctcaggctgtctcagttgggggaaacttggacaatacccaggctttctagggcagaggtccctgcggctttccgcagtgcattgtgtccctggttaacagagaatggagaacagcgataacttttaccaagcatactgcctgcaaacatattaacaaggcacaccctgcacagccctaaatccattaaaccttgattcaatacaacacatgtttctgtgagcacagggttgaggctatagttacagattaacagcatctcgaagcagaacaatttttcttagtacagatcaaagtggagtttcttatgtcttccttttctgcatagacacagtaacaatctgatctctctctcttttccccacagaaaggagaatcacttgaacccaggaggaggaggttgtggtgagccgagattgcgccattgccctccagcctgggcaataacagtgaaaatctgtctcaaaaagaaaagaaaagaaaagaaaaaaagatatatactcccctaagaaaagaaaaaaagctatatactcccctcacaaactggggacctcaagatctccaccctaaaatagttattttgaatttccccctggcaatgtaaaccgagagcttatctgcacaggtgtgggacagaaccaatccctctgcacacctgagacaaatgcctatctgattgcttcccctgccctattgtttacataaaaacgcagggtcactgaggcagtcgaaggcataagtgactattcctcctcccgctctcacatataaattgtgtatttagtgaaaggttgatcaaagactcaaagaatgtgatcatttgttatctacctgtgacccggaagccccccaattccagttattccacctttccagactgaaccaatgcatatcttacatgtattgattgatgtattatgtctctgcaaaatgtgtaaaaccaaactgcagcctgaacaccttgggcacacattgtcaggacctcctgaggctgtgtcacgggggcatttttaaccttggcaaaatagatttctaaattgactgagacctagtagatacttttagttcacaagctcatgaacgcagaagaaattgagagaataagaaaaaagctaggtgtcatggaaagcacgaaatcagttccaaaatctgaactccttcatatttattcaacatagggaaatgctcttcaactttgtgtgattagattccatttgcgaatgatatatatttctagtatttgattaaaataacccattctatgtaattttagccaacttaaactgcaaataataaatgatcaattatatacatacataaaacttcctaatatttcacttagtattgctattactatgttcttggggcagaagctcagtctgtcagatacattacgagagactggtgtctccataattgtgcttaggactatgttgcatgaatggataaactgttaagcaggaacctaggagagctagggtgacaaagttcaagtccattaaaactagcaagacatattccttacagctcatgcacgagtcaccgtcataagatgtttatggttaaggaaagcagcttattgatacctgcaaggacaaatttctacagaaacacaatgtccagatgacccaatatcccatgacaatgtatgcttttaagatagcaggctggtctcggactcctgacctccggtgatccacctgcctcggccttccaaagcgctgtcaatacaggcgtaagccattgcgcctggccaaggatagctttaaatcaacaaagtaataagttttgttacagtgtcagcccacccgcaggtagacataccttagcttttacgtaggctttggccgggcgcggtggctcacgcctgtaatcccagcactttgggaggccgaggcaggtggatcacgaggtcaggagatcgagacaatcctggctaacacgatgaaaccccgtctctactaaaaatacaaaaaattagccgggcgtagtggcgggcgcctgtagtcccagctacttgggaggcagaggcaggagaatggcgtgaacccgggaggcggagcttgcagtgagcccagatcgcgccactgcactccagcctgggcaacagagcgagactccatctcaaaaaaaaaaaaaaaaaaaaaaagcttttacgtaggcctctatgtaagaaaaacttcaggaggaggcgttccccctgctttctgaggacgccctactgcgtaactggtagctttcaataaactctctcgcctcactacactcggaccctcgccttgaattttttactgcgcaagatccaagaactctcacatggggtgtggactgtgacaccattttaggcaacaaaacgactgaacgttatacaaaaacagacaattaatccaattctcacaaaagcaggaatttggtagtcctcatccagcatgccaagcaaagatccacactgtggagtcagcgctcacgagaacaaaggggctgacagctgggaaacatgggtggatgaagggtgaggcgctcagcagccgccaactgggattattggaaagggcaatagggtattgaaaggcggaggacacggtctaaaacgatacaaaagctgcagagccactgggcctgcgagcttcccatggggaagccgggactccctgacaactgcacaaactcgcgtggggatttcaacatcccgaagcacccagattccttctgggcgggttctggacagagagcggggacggaacgggaggggtaaaggtcgccgagggggccgggccagaacaggtgctgggtcggggagagagggtggaggcagctttggaaaccgggcctggttagagggtgggggtggggcctggaatgggagtgggcggggcaagagggaggaggctgcctgggggccgggctggacagcaggaaaaggcgggacccgagggttagcgtcatcttgggggtggggtctggaaggggttttttgttctgaagggcggggcctggagggggcgggtccggattcttttctcagctgggccgtggatgtcgcctgctctcatcctcttgccctccaggactgggtcctccgggttctgattggtggattgtttctgatgtgccatgatattacccctaatatcacagggatgcttcctgcccgttgaagttactatttcgaacaatcgaaggtaaaacaacatattgtagtgggccacctgtactgaacgttgaatcgtttttcctcttaagttgaaaatagtttcaatgcaaagagcttttttggagaaggtagagtcgcgcgtcctgcaggcggggcaagctcccctcagtctggggcagggcggtggagagggtcagggacctcggtaaaggggtggagtggggcgctggttgcagcgggcacagacaattagaacggcttattaaactaagcaaggtcctgggttgggttgtttgagtggataatggaaactgaagggtgacaagcagaactgcctattatacacaggaggtgaaggacaatttcatatttcatggaaataaagtcagggcccggagcggtggttcacacttgtaatcccagcactttgagtggccgaagtgagaggatcgcttgagcccaggagtttgagatcagcctgggcaacatgatgagacgtcgtctctaataaaaatataaaaaaatcagccaagtgtggtggtgcgcgcctgtggtcccagctgctggagcgctgaggtgggaggatcgcttgagccagggagttggaggctgcagtgagccctgatctcaccaccacactctagcctgggtgtcagagctagaccctgtctcaaacaaacaagcaaataaatgagaggtgtaattcctcctgtgaaaataaagagatttactttcctttcgtctcttttcttaggagacttatttagaaaatttgtaaatggattttgtctgtcttctgaggttttttgttgttttgtttttgttgtttgttttttagatggagttttgcttttgttgcttaggctagagtgcaattgcacgatcccagttcaccgcagccttcaacttccgggtacaagcccggtttcgaactcctgacctcaagtgattcgccatcttggcctctgaaagtgctgggattacaggtgtgaaccaccacacctggtctgaagtggtattttttagaaactaactaaaccttttttcagcttgatgacccagggatgtatttctgaaggacttgggagctctctttgaaaggcaaaatacaagggagacagtacctgtatctcagtaggaaattaaataattcatacatcaaataattccaatttaaagctatgacctttaaataattatgagcctttgaagagagaggccatttctcttactgtctcctgtctctgaagtaaaagctgaaaaacaacaggaatgaagtcagtggcaagaccagctggtgccactgatgaccaggcctgaggttaaaatattaacccccaactctaaccacatgtgctctcaatctatcatgaccctttcacgtggaaccccttacagttgtaagcccttaaaaggaccaggaactccttcttgggggagctcggttcttgagatgccagtcagccgatgctcccggccaaataaagcaacttccttctttaaccctgtgtgtgagggcttttgtctgtggctcgtcctgctacaccttgagagaaatgtgctcattcagcttgagtccagtggaatgcaggcgtaacttctacgagttttccttgccacgtgtggtggcccacacctgtaatctcaccactttgggaggtcgaggtggacagatcacttgaggtcaagagtttgaaactagcatggccaacatggtgaaaccacctctctactaaaaatacaaaacaaaaggccaggcgtggtggctcacacctgtaatcccagaaaattggaaggcttgggcgggtggatcacaaggtcaggagtttgagaccagcctgccctacatggtgaaaccccatctctactaaaaatacaaaagttagctgggctcctagctactcgagagcctgagccaggagaatcgcttgaacccgggaggcagaggttgcagtaagcagctgagatcgtgtcattgctctccagcttaggcaacagagcgagactctgtctcaaacaaaaaaaaacaatggtggcatgcacctgtaatcccagctacttgggaggctgaggcaagagaactgcttgaatctgagaggtagaggttgcagtgagccgaggtcgccccactgcactccagcctatgcaagtcttcctcttatttacaggaaaagttttcatgtaaataattagaaagactaagcaaccccagagataagacctcctgagatcattgtccctttttatggagtgataaagtaaccttccttgaagtgtatcactctgtcaccaatcaacttgctgcaacctatgcactggtcttgaatggaaaatgtgattgtcctaaagcttctgtctttccctgtgtgtgaaacctaaacgtctctactatggaacgctgatcccattcatttggagttgatgtttgccagtggctatcctcatgctttgtgttcagataaactctatatttaatcataaattctaaattttattatttactgctgacatcagtttctgtcggattttaggagcctcactacagagggcacctgtcgccatgttgtaaaactcacacttgtcaaaaaaacatgggttagggtttcttcccctcctcggcatgaagctacttagctgacacagatggttacctccattaccaagtagagccaggatgaactatgtgtgaccaagggtgttgtcaagtcctcttccctgaggactgattagtgtttatcttgaaaacatgtacttaatgggttgtatagaacagtgaagtttctttctctcttttcaacctcttagctgtttgtctatttcgcatcataatctggcctaaggcttatttattaatgaaatggttttaatttctttctctattgtcgtcgtggagatgatttctcattggggggaagactttttgtttgttttcaattatgttttctcaacaattggaaagtgaagtaaaaagtatttgttgggccaggtgcagtggctcacgcctgtaatgccagcactttgggaggccgaggcaggcggatcacttgaagtcaagagtttgagaccagcctggccaacatggtgaaacccgtctacaaaaatacaaaaattagccaggcatggtggcacgcgaatgtaatggcaggtactccggaggctgaggcaggggaatcgcttgaacccaagagggaagaggctgcagtgaaccgagatcccgttactgccctctagcctgggcgacagagaaatactctgtctcaaaagaaataagtaaataaataaagtaataaatctcttccacaaacgtgctgagacaactaactgaatatccagatggaaaagaatactgttggatccctatctcacacaatcaaaattgtattttaaaacattaaaaaaaaaaaaggaaaaaaagagacgaggaaggaagcgctgcgggagggggtgttactttgtcgctcaggctggcctggacccccaggctcagcgatcctcccgccgctgcttcctgagtagctgggacctcaggctcctgcccccgcgcgcgcatccctcccaccccggcgccccatccagcaggtggtcacctcactcctccctggcctgagcactccgtcccgcatccatggcggtggctttagggaaatctctgaagttgagcacggggtggacttgccctcctgagtgaatggagaatagaaagggggaggatttctattttgttttgtgggccgtcagcatgaaatcgtaccttccgcccaggcagggctttgcatttcacattctagtttgcatccccgttccagacaattccagggcttttgaatagtgcctcaaccttactggccggtctcgactccaaaaccctaaaacaggcgctggagcgagggtgacggactcacaggtcccaccccggccccgccctctgcgccttccaaagggcaaagtctctccgcctctcgccccgcccctgcttcgtcaggccccgcccacctcccaggtcccgcccaggcctggcttctgtcctgcgcgcagattcgcgaaaacccggaagcggatcgcgtggagtgacggtcccacggcagcgcgtgagtttggctctgtgttgtattaggtctgcacttcccaggtccctggcgcttctgtacctggggcgtggggtccccacaaacctggaaattctcagccgtcttccttcacccagagcaaattgagacgaccccgtgagagtccgggggtcgcttccttttgtgtttaaggtcgccctgaggctggtcccgtcccgggtctttctgctatagggcaatgtatacactttctatcgcgcatttttcctgctctaaacctttctctgactcctcccaccccgcgctttttgaagtcctcacccaaggggtggattctcgcccacttcggccggtggagcgcagaaccgcggccccagtcccgggaaggccgcgtcctctgtctggtcccgggatcctgcagaccccacccttgtcttaaggcgccctcgcgcccccccccccccacctccctcctcctgccgggccctgctgcttcctaggtctcccctccgcagtcacggcttcccctgagcccacgttggggaggtgcccggggcttgtcctgttgaaggaggccagcccttccacacctgtgggtatttctcgtcaggtgggaagagagactgagaaaagaaataagacacaaagacaaagtatagagaaaggacagtgggcccaggggaccggcgctcagcatacggaggaccggcaccagtgccagcctctgagttccctcagtatttattgatcattatttttactgtcctagtgaggggagtgtagcagggcaacaggtggggagaggtcagcaagaaaacatgtgagcaaaggaatctatatcatgaataagttcaaggaaaggtactgtgcccagatgtgcacgtaggctagatttatgtttctcttcacccaaacatctcagtgtagcaaagagtcacagagcagtattgctgccagcatatctcgcctccagccacagggcggttttctcctatctcagaatagaacgaatggaaatggtcagctttacacctagacattccattcccagggaccagcaggagacagaagtcttcctcttatctcaactgcaaagaggccttcctctttcactactcctcctcagcacagactctttacgggtgtccggctgggggatgtaaggtctttcctttcccacgaggccatatctcaggctgtctcagtggggggaaacttggacaatacccaggctttctagggcagaggtccctgcggctttccgcagtgcattgtgtccctggttaactgagaatggagaatggcgatgacttttaccaagcatactgcctgcaaacatattgttaacaaggcacaccctgcacagccctaaatccattaaaccttgattcaatacagcacatgtttctgtgagcacagggttggggctaaagttacggattaacagcatctcaaagcagaaacaatttttcttagtacagatcaaaatgaagtttcttatgtcttccttttctgcatccacaaagtaacagtctgatttctctttcttttccccatatcctgtgacatggggtgttcttccctgcccagctccagccccttgaaaatgcgctcccctggtatgtagccatcttactccaaaccgtcatgtgattctgtgggctaaagggatcaggagacacacgcagtagaaaacctgagaaagaaaagaatgagaaagactcataacagatggcaaagtagagaatgggtgagggatttgccaagagacaacgaaagtgaaaaaaatatatataagaaagcaggaggagaaaagcaactggagacatgcagagaaaagctagatgtacagagagatgaaggacagcaaggtagggagaggggcagcaaagagggaggctcatcagggtgagggagaggaggagggatttggagccagggcagacagagcagagtggtgctggtggcaagaacagagggagaagcacagcagggaggacacctggggatctaggctgccagagagtggggacagggggtataacagggaagagagaatttaacggggagagcagaggaggcgcagagatggtgttgcgggaaactgaggactagagagactgctatgggggagacagaaggatgtttacttaaggtacgcaccggctcagtggatttacatctaaaaagctgagcatttcaacaaagagtggggtttttataagcaggcttacagaagcaaaataaaagcagttaatcatgtaatgattggtcacataatctatagcatagcataacttgtggccttgcatagctggtggtcttgcagctgcattgaaagaaaagcaagaacagctaaatacatttgttttctttctttctttctttctttttcttttcttttctttctttctttctttcactcttgttctaaaggggaggaggtgtctggagcccattcctttggcttcgacttcgcaaacagcgttatgttataactgttctctaagtgagcttgctaggcagaggaaaacttgttcttctctttttaacccttgccttgcctgttacttttcttggagtgaatgaatgcatattttttttttaatttctgcctgagttttctccctttgctttttataaacaagattttaatagaaagcatcactattacttgattattcatgaaaaagcaggttttcttctttaggcacaggctgatatttatatggagctattagctgagtggtagtctgcctagtgacaattgcttctatagttgattgaatgttccttaacaaggagaggtaagaggtaagggagtattaaaccaattcttagtatttctagaaccactcctgttaaggttttgaatcgactgaaggaggaaaaccagccgctaaagagggactcaggagtctactttgtctaagtctggactggaacatgggataatttttttattcttgcagttatttctataacagccttcctattgtcattgatttctaggcagcaattagttagattaaactttctacatactcctccttcctgggctaggaggtagtcgaaagctaatctattttggtagatggcatttctcatttttgtggcttgctgggccagtaagtctaatgcatttgctgtttcattagtgatgatttcaagtactgcttgcaactttatgatgcggttaagcatgtaaattggggtgcggtacctttatgacttattttgtgcccaggtagctggcctagagtactgaattagtctttcagggggccaatctgtgtctttctagtcttctatttttatgtcttttcttatgtctatatctcttttgtttttttctttaattttattgtagacaggataccttcaagtttctccctgttgcagtgggagtgagaagaaacatggtctaattgtttcaagtacacaagcccttgtcctttttcctggcaactgtcggtaggcccttggtgcacagatctaatagagaccagagggtgcttgccaggtatttggagcttcaagctgatactatgtgtggtttagagaagagaaacaggagaatgggtttggatgaggtgatctggagtcatctttgccttgccacaaagttttctttagtgttttattataatattcctgtcttaaacaagttaattcttctagggagtctgtaaaagcttttccttagtgagcaacacagtatctcctgataatggaagtttttaagagctaggggcttaaggctgggtgcggtggctcacacctgtaatcccagcactttgggaggctgatgcgggtggatcacaaggtcaggagatcaagaccatcctggctaacacggtgaaaccccgtctgtactaaaaatacaaaaagcaattagccagtcttggtggcgggcacctgtagtcccagctactcgggaggctgaggcaggagaatggcgtgaacttgggaggcggagcttgcagtgagccgagatcacgccactgcactccagcctgcgtgacagagtgagactgtctcaaaaaaaaaaaaaaaaagtgctaggtgcatcggttcgggggaagagtcagttagagttaaattatcttgtgacattaactcttttgcttcttaaggccattggtctcctatgttagtccttctacaaacataacatgagaaaatgcttaagctgctagcaatgttttcagctagccgagcaaacaggtttttagctaaaggatgatgctctcgtaacttctagtctgcatgcttatggaatgatttaaaaactcggaattgttgctggtccgggttcctttttgataacatataggtaggtttctgggtaggtgtgtgtggagacatgtatggggtaacctgcagtccacacgggtaggtctggctttagaatggtgaaatttactggatgacaggtttttgtttcacagtctggttttactggcatttcgataagcataattggcctttgttgtgtgctggggtgccacgatatgcaatactgagaatctttttctgggtcccaggggacaaggtggcatgcatacatatttgtagtcatttctatagtatctttatacaggtaggttaccacagacggatgagtctaggtctgctgctggacaagcatcaaaatacagagaaataggccatcggtaaaagggagggaccttggtttggtttaagagggaactttcttttgaccttgcatgtattttaaactattcaccaggtgaaaactttgtgttataacatacataaggttggttatttcctgggtcacaaattgagtagatggtctgattataagtacaagtctttcttttttttttttttttttgagatggagtttcactcttgttgcccaggctggagtgcaatgacatgatcatggctcaccacaacctccaccttctgggttcaagcaattctcctgccccatcctcctgaatagctgtgattacaggcatgtaccaccatgcctggttaattttgtatttttattcaagacggggttgttccatgttggtgtggctggtctcgaactcccgacctcaggtgatccacctgcctcggcctcccagagtgctggaattacaggcatgagtgaccacacctggcctttataagtacaagttcttaagcgagtccttgtacactcataataagtatggtgcagtagagtcttagttatcctgttccctgaccaggtaggtagtatgtgtacagtggggacacatttctatagttgctttttctaccatggttaaggagggtagcaacagcaaaacagtgtacagcatgttcatatccagcaaggacagaagagggccttgcctggcagaggaggttgagcacaacgacagaacaataataaaacagttagtattacaaggaaaactactagtcttaagatttctaaccacatttacttgcttgatgagtcctcaagcttcagctgtgcgtagactagtcagcttctggtgtgtgactagagcagggcttgtcccctccagcttcagctgtgcataggctagtcagcttccggtgtgtgactagagctgggcttgtcgtcccctccagcttcagctgtgcatagactggtcagcctccagagtgaccagagcagggctgtcgtcctcagcagcagcttggtctcatctcaggatcagctgagttggatggtctgggtcttgctggctggtccacttgccctgagctgccagtttcagctgactgtggtggatctacggcatgattcctgcaaatttaatagcagtgggagtggacaagattacaatatagggcccattctatatgggtcttagagaagttggattctactttttaacctaaacagagtctccaggtttaagcggtgtactggatctgtcagacttatcggcattctttctcatattcagttatgggcttcttgcatggctattattaaagcctgcatttgttttcttaaagttaattcctctagttcttggagatcacttttaatttgacttatgattggagaggccgactgaacgaactctcataaggtgaatacctagtttatttggtgggggtgcacctgactcagaggacaaccatatgaaagacctgatcttatctcaggtgagtttcttggcagtatttcttcagtagctgcttaacgtctggttcatgtattttacttttcttgaactttccggccaataggctatgtgtaacttctattttatttttagcagtcttgttaaatcttgcactatttcagctgcaaatgctggcccattgtctgactttagagatagaggcagtccaaacctgggaagaagtcttcagtcacttctcatgctttttctgtcctggtggggaaagctttaacctatcttgaaaaaggtacaaataagcactagcatataccgacatcctctgtcggatgcacggagcagttcggtaaagtttataaccaagttttcacaaggcatggctcctgcttcttgaattcttgggggccaagtgggcccccataacggttattctgagcacaggttaaacattgtttacaaatggctcaaatgacagcagagagccacagcacatagaaatggcactttcgtggccgggcgcggtggctcatgcctgtaatcctaccactttgggaggccaaggtgggcagatcatgaggtccggagttcaagaccagtatgagcaacatggtgacgtccagtctctactgaaaaaacaaaagaagtagccagtcatgatggcaggtgcctgtaataccagctactggggaggctgaggcagaagaaacacttgaacccgggaagcagaggttgcagtgagccaagattgcaccactgcactccagcctgggtgacagagcgagactcaatctcaaaaaaaaaaccagaaatggcactttcataacgttgctaatgctgtttttcttatatgagtttcttgatgagtttgcttcacaaacttaggagctaacatctttggaatggctagtctcctatcaaagaacttctactaccttcttttaatatattttttatcttcttgggcaaaccaggatctttgatttggagtataacttgggttgtcttggagaggaggttctgggaggagaggcatagctaaggcttcctctttaaaatgcagcgtgatcattgctgcctgctttgcctctctgcctttctgtttcctgtggcttctggcatccttgccatttggtgccctctgcagtgcattatagctactttctctggagcctatactgcctctaagagctgtagaatctcttctttgtactttatttcttgcctctagctgataaaagtcctctctctttatatatagttccatgtacatgcaaggtagtaaaagcatacttagaattagtgtaaatactgacttctcttttgctagcaacagtgctcttgtcagggctattaattctgccttttgagctgatgttccggtaggcagaggctgagcctctactactgagtctgatgttaccactgcatacccggcatgtccaaactcttctagcacagaactacttccacctgtgaagtacttgacatctgggtctctgaggggtctgtctgtaagatctttctcattggggaatacctcgtctactgttttgacacagttatggagaggagctgcctgttcgactgggagcagaatagccgggttagggtgtttactgttctaaaattgtgtaagggttttcacatagaagcccttggtactgagtcatcctcaggtttgataactaatggtgccttctttgatccatcaaagttatgactcagtgtggcacccagacggttagttgctgtcctagagttaatttgctagcttcctgtgttaacaagatggtggcagctaatgccttaaggcaaagaggccatcttaacaccacggagtctggttgtttggataaatgtgccactgggcgatgccacgatcctataagttgagtcagagcccctatagtcattgtttttttgttcatgaacatatagaaagacttagttatgtctcatagtcttaaggctgggacctgagttaaagcttccttgacctgcttgaagtctatttcttgattaggttttcaaaggaggggctccttttctcctctttttgtggcttcctattaacgacttagccatcagtgaacaatttggaatccggaatcttgctgcctctaaaaattcctatttgacgttgggtggccggggttggaagggcacaaatggcttgcttccactcatagccaagccagtgttccttgtggctcactatgacacctagatatatggaacctcttcaaggcaaatttgggcttgcttttttgatattttgtaacttattttctataggaaatggaagagatcctgggttccccgataacagtcctcttagattggggccggcaaaagaagctcatctgcatactgcaacaaggtgcagttgctatttggcagggtataagccatgaggtctgaagccaatgtttctctaaagattgtgggagagaaccgggcatggtggctcgcgcctgtaatcccggcacttcaggtggttggggtggctggatcacgaggtcaggagtccaagaccagaccggccaagatggtgaaacccggtctctactaaaaatacaaaaactggccacatgcggtggctggcacctgtaatcctagctactctggaggctaaggcaggagaattgcttgaacccggggggcagaggttgcagtgagctgagatggcaccactgcactccagcctgggcaacagagcaagactccatctcaaaaaaaaaaaaaaagattgtgggagagtttttttgtttgtttgagacggagtctcactctgtcgccgacgcttaagtgcagtggtgcgatcttggctcactgcaagctccgcctcctcccgcctcctgggttcacaccattctcctgcctcagccttctgagtagctgggactacaggggcccgccaccacgcctggctaatttttgtattttaagtagagacggggtttcaccttgttaaccaggatggtctcgatctcctgacctcgtgatccacccgccttggcctcccaaagtgctgggattacaggcataagccaccgcgcctggctgtgggagagtttttaaacctttgtgggagtctagtccaggtgaactgtgacgcttcattgtcttatgaaatgcaaagataggctgactaactggtgccagacagatataaaagaaagcatcctttaagtttaagactgtaaactaggtagcacttgctggagtcctatcacagtgtacgggttgggtaccactggatggatagttaccgtggcctggtttacaacatgcaaatcttgcaccagcctatattcattagaccctggccctggcaatggcttctgaactgtcaaaagtggagtgttctaaggcgactagcattggactaaaatcttatgtttatagagcctttctgaacgcttgcagatgccctgtatggatttttggggaactgggtactgacgaacctgaaacaggagttgctcctggttttgattctgctactactggcgcatgatttacagctaacccacgtgggttgtcctcagcctgtactccaggaatgtctttaactaactggaataataatttttcttctacttgagtgtgaggttgcattggtgcctgaaaaaggggttgggcacagtggctcactcctgtaatcccaccatttttggagcctggggcaaggggattgcttgagtccaggtatatgagaccagcctgggcaacatagtaagacccccatctctgccaaaataaataaataaaattaaccagatgtgatggtgcacacctgtactcccagctactctggaggccgaggcaggaggatcacttgatcccaggaggtccaggctgcagtgagccgagatcatgccactgccctccagcctggtcaacagagtgagaccctgtctcaaaagaataaaaggggtgggggactttgtgttcagatgagtgggtgagttcactgggtatgattacttgtgacatgttgacttctgtgtatataatctaataacttaaaatttgtttaaattatacagatgagattgagaacttaaaaattcctatctataaggcatgtacattgtataaatcttggcatagaggtcagcttccacttggaatccctattcagccagagagcagtgacttattcagttgtgaatcactctattcccttttcgcagggctggggtaggaagtagggcaatgaagtgggaaaaaaatgactttctgttattacataatacttttaattaaattaattaataattaatattttgggacagggcctggctctatcacccaggatggagtgcagcatgatctcttctaactgcagcctcgacctcctgggcttaagcgatcctcctacctcagcttcctgtgtagctgggaccacaggcgtgagccaccaagtcggacaagtattgtattttttttttgtagaaacgggtttcgctatgtttcccaggctggtctcaaaatcctgagctcaaaggatctttctgccttggccttccgaaatactgggattacagggatgagccaccgcacctagcctacatagtactttttaaaggggacatcaaaacgtggtggctcctgccagtaagcccagcactttgggagatggaggtgagtgggtcacctaaggtgaggagttcaagaccagcctggccaacatggtgaaacctggtctctactaaaaatacaaaagttaggcaggcgtggtggtgtgcacctgtagtcacagttactgggaaggccaaggcacaagaatcgcttaaacctgggaggtagaggttgcaatgagccgaaattgtgccagtgcactgcagtctgggtggcagagcgagtctccatctcacaaaaacaagcaagcaaacaaaaaataaaataaaaaacaaaagggacatcaaaagtacatttgttcttatgtgtaatagatttactttattttctttgtttcctcttcattgctttttttttttttcagtttgagataaattgtaggtttttgttttttgttttttgtgtttttttggcagaatcttatgcagtgacccaggctggagtgtagtggcatgatgtcagttcactgcaacctctgcctcctgggttcaagtgattcttttgcctcaacctcccgagtacgtgggactacaggcccacgccaccacaccaggccaatttttgtacttttagcagatatggggtttcaccatgttggccaggctggccttgaactcctgacctcaggtgatccacttgcttcggccccccaaagtgctgggattacaggtgtgagcaaccacgcccagctgagataaatcttagttttcaaaatttctcttttaatacataatcatggagaggaggctgcaatgccgaatggaggaggcaggaaccggagtgtgagcagtagctgggtgggcaccatggctgggatcaccaccatcgaggcagtgaagcgcaagatccaggttctgcagctgcaggcagatgatgaggagtgagctgagcacctccagtgagaagctgagagagaaaggtgggcccgggaacaggctgaggctgaagtggcctccgtgaacggtaggatccagctggttgaagaggagctggactgtgctcaggagcgcctggccactgccctgcaaaagctggaagaagcgggaaaagctgctgatgagagtgagagagatacaaaggttattgaaatctgggccttaaaagatgaagaagatggaactccaggaaatccaactcaaagaagctaagcacattgcagatgaggcagatgggaagtatgaagaggtggctcgtaagttggtgatcattgaaagagacatggaatgcacagaagaatgagctgagctggcagagtcccgttgctgagagatggatgagcagatcagactgatggaccagaacctgaagtgtctgagtgcagctgaagaaaagtaccctcaaaaagaagacaaatgtgaggaagagatgaagattcttactgataatctcgaggaggcagagacccatgctgagttggctgagagatcagtagccaagctggaaaagacaattgatgacttggaagataaactgaaatgcaccaaagaggaacacctctgtacacaaaggatgctggaccagactctgcttgacctgaatgagatgtagaatgccccagtcccaccctgctgctgctccttcctctgaccctgactccgcctgaggccagcctgcccgaagctgacctttacctgagggctgatcttcaattggaaggctgctttctcctctcaccaccccctcctcccctgcctctttttcaccaaactgtctctgcctcttcctggagattccagctgggctagaggctgagaacctttgcaaacaacatttaagggaatgtgagcccaatgcatgtctttaaaaagcatgttgtgatgtaaaaaaaaaaaaaaaaacataattacttctggaagatgcctttgtcacatcctataatcagctcacatcattttttttctgtacatttcccagttatttacctgttgaccccagaatttgttagatttttgaaagacaatttctaaatagtttctgtttgaaactagttgcatctggttcagatcaaggtctgcatgctttctagtctttattatttattgaaaacctttagtaccgaatacagaagtttgattatttcagtgcctacctggtaaagatgtcagtgaccttttaccttaacatcaaaatgtagtttaaccagttagtgtatttttcagttttctttccttatgt[450 bp omitted]tgggagtgctagaagcaaggaagcagcaagtctgggcacattccagaggccacgaggggttttaggccctggaccctggcatgttccaagactctttttatattatgtcagactagcaagccctgcctcagcttttccccaacatggaatgctattctaaaagcacccatgtattctttttttttttttttttttgagatggagtttcactcttgttgctcaggctagagtgcaatggtgtgatctaggctcactacaacctctgcctcctgggttcaagtgattctcctgcctcagcctcccaagttgctgggacaacaggcacccagccaccatgcccagctaaatttttggatttttagtagagatggggtttcatcatgttgaccaggctcgtctcaaactcctgacctcaggtgatctacccacctcaacctcccaaagtgctgagattacaggcatgatccattgaacctggccacccatgtattcttgattgaaaaactttgcttatgtcttagttctacagctgaccctctttcactgttttcaaggtcaatagctgtgtgttcacacttctgtgttttataaatgttactgtgattttcttgtaaggaaaaattaaaatttgggaatcaatggcatcagaaccttgcaaatgaagtttctttagcccaggcatatgaaagatgcttctctaattttcaaggataggggtgatgaagaccaacccttcccattagcatttccaggccccaatgtaagaagaattcaggcacacattttcactcatctcagacattctcagggtagcttggtgaaaatttctctttctctgagccccagtgagcctccctgcaactaggagatgaggggctagaccagaaaagctcaacctgaatgaccctggtccctgaaatgattggcaaaatagagtacgtgtctgggtatggcttttctcatgggagaggggagtgcccagttgtaattagaattttaaatgggatgcagtaccccaaaaataaaaaagaataaaaaaatgcaaaagaatggaagaaacagagttgtagactcagacacagagaccatcttcgaggcctttctctgtatgaggacatcacagcaaaatctaaagcaggtcacgtcagtccctggcagggaaccctccaccagcttcccgtgttccccaggacaaaaggccaactcctcactgtggctccacagccctgtgaccagggcccctgccagtgtccagcctcctcctgggagcttgccctcatcttatgactccctctgccccagtcacatttgcttttctcttttcccaaacatcaaaacccttcctgtctctggtcattgtccctcctcttactctatgtccctaaatgatcacggcactgtccctttctcctccttcaggtctaggctcagagctgtctcccatgccctcccacccccatctgatgttccctctgcccgtcagtctctatcacgttactcaggttctattatctctgcatcaatcacatcaggaatgctttttgtttttttttttttttttttttttttttgagagacagaatctcactctattgcccaggctgtgagtgcagtcttgtgatcttggctcactgcaacctctgtttcctgggttcaagtgattcttgtgcctcagcctcccaagtagctgagagtacaggtgtgtgccaccacacccagctaattattgtatttttatttttattttattttattttattttatttttgagtctcacattgtcacccaggctggagtgcagtggcacgatcttggctcactgcaactgccacctcctgggtacaagtgattctcctgcctcagcctcctgagtagctgggattacagacacccaccaagcccagttgctttttatatttttagtagacatggggtttcaccatgttggccaggctggtctctgacttctgacctcaagtaatgcaccctccttggccttccagagtgctagtattacaggcacgagccaccgtgcccggctcaatttttgtatttttagtagagacagggtttcaccatgttggccaggctggtcttgaactcctgagctcaagcgatcctcacacctcagcctcctaagtaactgggaccacagacacacagatgtgcacaaccatgcctggctaagtttttgtatttttggtagagatggggtttcaccatgttgcccaggctggtctcaaacctgagctcaagagatctacgcacctcggcctcccagagtgctgggatgacaggcatgagccaccgcacccagcctttgcatgaggtttggtcaggcctgggtctgtgccctaaaggggagctcatcccaccccagctccccactgctgcagcgtgtgtgtgggcttctccgggaggggagtgggagttttcctgtaggagtttattgtccctggtgtggtcggcagcataggggaccgtatttcctcaggatgaggtctcctttgtatgtgttgttgtgttacagggaggggatgtgttgattctgagcaataaacaacatatttctaacattcaggattgacttctaaagactcttggtatgtgaggaagaaacctggaagaggaagaggaaagcaaaggagtcagggatggctcttcctcaggtgagatgatatttttggtggattgttctgtctccttcccctcagaaatgctgggccttggagttgggaatcttctctgagtctgaagcatcctgcctgacaggtttgctcacattcacccatgccttccctcagtccctcttttctcacttagattccatctcttgtgaccgagtgacatgaacttgggaagaggctgcactgggcatggtcctgggaagggctcacacccagacatggatggagacggggtgagggtcccatggtgtcagtgctgttgggcagcagggattgttcagtggccacatgtggatgctctctcagctctctgtggactaggattagagcagctgccaatggaagtcacatattcatgtgcacaaagtacgtggtaaattctagaaaaggcaaccaatatggggaaatgttttctgcctgattttatagtacatttttagttttttgagtgagttactgtgtttctgactccaaaaatcttagtaattagaatggaaagttcatacagacatgaatgatagaagatgttttatcccatcattactttaagaataggaaatcaacctgaatcatagcaggagattcattcaaccattcttagcacattacgctcatggagactgtggggttactgtggagaggcttgtgaaacaggtgttttcaggaaaatggttataatttgtattgtcattattattaaattatgataatattattgtattttaaatatatgaagtcttggtctgtcacctaggctgaagtgcagtggcatgatcttggctcatgggaacctccatcttccaggttcaagtgattctcctgcctcagcctcccaagtagctgggattataggcgtgcgtcaccccgcccagctaattttgttgtatttttattagtgacgggtatcaccatgttggccaggctggtctcaaactgctgatctcaggtgatctgcccacctcagtctcccagagtgctgggattacaggtgcgaggcaccgtgcccagccccaccaattattattaaatacatatttttatatttaaccatcacatgatgtatatatttgttttgtggtaaaactccaagcaaagctgcagcttagactttttgctataaagcatctcctttccctgtcacgtcctccaccctccttccagcctcactggggagccgctactgtcagttcggtgtcaggtgtcagagcaagtctcatacacgtgtatttctgcatcactatgagacttaaaaaaaattctgctgtaaattaaaaaaaaatacttttttgcaaaaattagctgagcacacctgcattactacagatatctgaagatccctccaggtcaggcagttgaaagggtgattgcttcctctaggatggggcatttcctgttttcttagatctgagaggattccaccctgcccccaactgccaatgtgtccttttccagcaagatgagatccctcttcagttcaacaaaacttgctactttttatatttgtaaaaactttatatacacactcacatatacaatatacacacacatatacatctccatacatatacacacacacaaatgtatatattttgaacaacttttacagtttgaaaatctggggaaaatgacaaccctttgtattaacatctagttttttgtgagtctctgtaggtttcattattttgttgacatatatgtatgtcatgacatatatacatgtatgtcatgacatatgtatgtcatgatatatatcgtgatatatacatgcatgtcgtgatatatacatgtatgtcatgacatatatacacatacacacacaatggattttcatactttgagaaatctagttttcatgtattttcttttattttaagactgggtctcaccgtattgcccaggctggagcacagtggcgtgatcttagctcactgcaacctccaccctcaggctcaaaccatcctcctaccacaagctcccaagtagctggaaccacaggtgccatgccaggctaatttttatgtggtttttttgttttcgtttgtttgtttgtttgtgtgtttgttttgagatggagtctctgttgcccaggccggagtgcaatggtgcgattttggatcattgcaacctctgcctcctgggatcaagcaattctgctgcatcagcctcccgggtagctgggataacaggcgtgtgccaccatgcccagctggattttagtttctgatctttcactgtggacgttgtcatctctgaaggcatcacccatactctgtctcatctagatactgaatgtcacttgctgtgtcaataaaagtttctgggccgggcgcggtggatcacgcatgtaattccagcactttgagaggctgaggcaggcagatcacaaggtcacaagtttgaggccaatattgtgaaaacccgtttctactaaaaatacaaaaattaactggccatggtggtgcgtgcctgtaatatcagctactcaggaggctaaggcaggagaatcgcttgatcctgggaggtggaggttgcagtgagtggagactgtgccattgcactccagcctgggcagcagagtgagactccacctcaaaaaaaaaaaaagcataataaaacacagctgggaagacaaaatgtggtgaagaaccccttactcggatttgtcagaacattcactgcaattaaatccatgctttcccctctctcctcttctcattttctgtgaagataagaactcctcccataacaatttccttaaaatgtgttttcatttcagggtctattgacattcagggatgtggccatagaattctctcaggaggagtggaaatgcctggaccctgctcagaggactctatacagggacgtgatgctggagaattataggaacctggtctccctgggtgaggataacttccctccagaagtggggatgtgcccttgtgtatctttgtattttctcttgtttttagatacagtgtcttgctctgtcacccagggtggagtgaaatggtgtgatcatggctcactgcgatcttgaattcctgggctcaagtgattgtcccacctcagcctcccccagtagctggtacaggtgcatgtgaccatgtccggctacttttttagtttttttttttttttttttttttagagaatgttcttactgcgttgttgaagttggtcttgatctcctgggctcaagagatcctcctcagcctcctgagtaactgggattacaggcaccaacccccataactaattattggcttttacttttaaaatttttgcatatgtatgtccttaaggccaatatgagtcttctgtagaaaacatgtagttggttcctgttgattcagccagtctttgccttctgagtgcagagttaaatatttacatttgaagtattactgatggagaagaccttaccattgcatttctgttacatattatctgtattgtagattttttttgttcttcatttctcatttactactttttgtgtttaattgcttttttgtgtagacatgctttgactcccttcttatttactttttttgtttgtttgtttatgatggagtctcactctgtcgccaaggctacagttcagtggtgcgatcttgggtcaccgcaactggctctgcctctccagctcaaccgatccttgtgccccagtggctcatgcctgtaatcccagcacgtagagaggccaaggcaggcaaatcacctgaggtcaggagttcaaaaccagtctggctaacatggcaaaactccatctctactaaaaatacaaaaattagccggacactgtggtgggcatctgtaagccctgctactcaagaggctaaggcaggagagtcgcttgaacctgggaggtgaaggttgcagtgagctgagactgtgccattgccctccagcctgggcaacagaacaagactctgtctcaaaaaaaaaaaaaaaaaattccataacctgcaaaaacttctctttctccaccagaactctttatttatgtcagaattatttgtgtatgttgcattttcatcaacatatatgtatattgtgttttcatgctttttttcttttaaataatagaaaaaaagttgaattatgaagaaaaggtacacttacaacagtttctgtatctgtacttttatttgcctattcatttatttatttatttgttggtgagatgaagttttgttcttgtcgcccatgctggagtgcagtggcacaatcttgggtcactccaacctccaactcccaggttcaagtgattctcctgcctcaatttcccgagtagctgggattacaggcatgtgccaccatgcctggctaattttgtgttttaatagacacagggtttctccttttttgtctggccgatctcaaactcctgccctcaggtgatccatcaacctcagcctccgaaactgctgcgattacaggtgtgaaccaccgcgccctgcctgtctgtcttttaatttacctttactggagaactttatatatatttgtgggttggagtgactctttagacttctttcatttccttttttttcttttttttttttgagatggagtcttggtctgttgtccaggctggagtgcagtggcatgatcttggctaactgcaacctctgcttactgggttcaagtgattttcctgcctcagtcccccaagtagatgggactacaggcacatgtcaccacacccggctaattttttgtattttttttttttttgtagaggtggaggcaggatttcatggtgttagccaggatggtctcgatctgacctcgtgatcctcctgcctcagcctgccaaagtgctgggattacaggcgtgagccaccgcgcccagccgttagtcaattcttattccttataatgctgtgtatatttttgacctcataaattaacatgtagtgatcttaacatgtatttcagttcttatattgtgttctggtggtatatagaagttgtggcttttttcttaacagggaattgtttagaattctgcaggttgtataaatgtacttgttatttgcttgctagttttatgagttacaatattttactaactaatttttatgattgtacataaagcttttcggtatgtggtatgcaatataactgacacagtccactagttaatgtcatttttttttgagacagagtttcactgttgttgcccaggctggagtgcaatggcgtgatcttggctcgctgcaacctctgcctcctgggttcaagtgattctcctgcctcagccttcccgagtagctgggattacaggcatgagccaccacacccggctaattttgtattgttagtagagacggggtttctccatgtttgtcaggctggtctcgaactcctgacctcaggtgatccgcctgccttggcctcccaaagtgctaggattacaggcataagccaccgtgcctggcattaatgtcacattaactggggcactgtggctcgtgcctgtagtcccaggactttgggaagctgaggcgggtggatcattgaggtcaaaagttcgaccacagcctggccaacatggtgaaaccctctatctactaaaaatacaaaaattagccaagcatgctggcatgtgcctattatcccaggtactcaggaggctgaggcaagagaatggcttgaacccaaaaggtggaggttgcagtgagccaagattgggccatagcactccagcctgttgtgacaaagtgaaacttcatctcgaaaataaaaaaatacaaaaatttttaaaagaacgtcataacgtgccttttctgcataggtataggtaattttatgacagtaattcagaaaaatattgtattaacttttattttgagattaagtctcactttgttacccaggctgaagtacagtgttgcaatctcagctcactgcaacctctgcctcttgggttcaagcgattcttgtgcctcagcctcctgagtagctgggactacagacgtaggccaccacgcctggctacattttgtaatcgtttcttaccttttcagtgctatgattgtttgacaatacagaatttccattgattttggttatccttacatgagcttgttgtggattatttaccaatatggtatatcatgtggtcctttagcatttatttgtatacagcaaatatgctgtaaatatgaagaatatatacttttcattggtgtgacggtgatatgttttttgcaaactgttagacactttacggtcacagtggaaaaatactccttactttaggcttatacacatttgtgcactgtcagtgttttgtcgtgatattggaaatagggttccgtagagatgatttgaagcacatgtaatagccctttatctaataaagaatcttacgcttttgtgttcctaaactttgaagatcatgttggggaagtttaaaatgagtattttttgtgtcacatttacacatttcagtattatttaccatctgtactgaactggaaacctattcgtgtttatattttgtagatatctcttccaaatgcatgatgaaggagttctcatcaacagcacaaggcaatagagaagtgatccacacagggacattgcaaagacatgaaagtcatcacactggagactttcgctttcaggaaattgataaagatattcataacttagagtttcagtggcaagaagatgaaagaaatagccatgaagcacccatgacagaaatcaaaaagttgactggtagtgcagaccgatatgatcaaaggcatgctggaaacaagcctattaaagatcagcttggatcaagctttcattcgcatctgcctgaactccacatgtttcagacccaagggaaaattggtaatcaagtggagaagtctatcaacgatgcttcctcaatttcaacatcccaaagaatttcttgtaggcccaaaacccatatttctaataactatgggaataatttccggaattcttcgttactcacacaaaaacaggaggtacacatgagagaaaagtctttccaatgtaatgagagtggcaaagcctttaattatagctcactcttaaggaaacatcaaataatccatttaggagagaaacaatataaatgtgatgtatgtggcaaggtctttaatcggaagcgaaacctagtgtgccatcgtagatgtcacactggggagaaaccttacaggtgtaatgagtgtggcaagactttcagtcagacgtattcccttacatgccatcgtagacttcatactggagagaaaccttacaaatgtgaagaatgtgacaaagctttcagtttcaaatcaaaccttaaaagacataggagaattcatgctggagaaaaaccatacaagtgtaatgaatgtggcaagacctttagtcagacgtcatcccttacatgccatcgtagacttcatactggagagaaacctttcaagtgtaatgagtgtggcaagacctttagtcggaagtcatcccttacatgccatcatagacttcatacgggagagaaaccttataagtgtaatgaatgtggcaagaccttcagtcaggagttaacccttaaatgccatcgtagacttcataccggagagaagccttacaagtgtaatgaatgtggcaaggtttttaataaaaaggcaaaccttgcacgtcatcatagacttcatagtggagagaaaccctacaagtgtactgagtgtgtcaagacgttcagtcgaaattcagcccttgtaattcataaggctattcatattggagagaaacgttacaagtgtaatgagtgtggcaagacgttcagtcgaatttcagccctcgtaattcatacggcaattcatactggagagaaaccttacaagtgtaatgaatgtggcaagggttttaatcggaaaacacaccttgcatgtcatcatagacttcatactggagagaaaccttacaagtgtaatgaatgtggcaaggtttttaatcgaaaaacacaccttgcacatcatcatagacttcatactggagataaaccttacaagtgtaatgaatgtggcaaggtttttaatcaaaaagcacaccttgcacgtcaccatagacttcatactggagagaaaccttacaagtgtaatgaatgtggcaaggtttttaatcaaaaagcaaaccttgcacgtcatcatagacttcatactggagagaaaccttacaagtttaatgagtgtggcaaagcttttaattgaaaagcaaagcttgcacatcatcatacaattcatactggaaagaaacaagtgcaatgagtgtggcaagaccttctgtcacaattcagtccttgtaattcataagaattcatactggagagaaacaagtgtaatgaacgttgcaaaatttttaatcaacaagcacaccttccacgtcatcatagacttcatagtggagagaaaccttagaaatgtgaagcatgtgacaaagtttacagtggcaaatcgagcctcaaaagacaggagaattcatactggagagaaagcttacaaaggtgaagaatatcacagagttttcagtcacaagtcaaaccttgaaagacataaaataaatcatactgcagagaaaccataaaattgtaagagttcgtgacaaggctttcgggcatgactcacacctggcacaacatcctagaatttatactggagagaaaccttacaagtgtaatgagtctggcaaagccttaatgagcagtcaacacttactcaccatcaggcaatccatggtgaaggaaacttgactaatgtaatgattgtcaccaagtcttcagtaacgctacaaccattgcaaatcattggagaacccataaggaagagagatcatacaagtgtaataatcggcaaatttttcagacatcgtccataccttgcagttcattggcgaactcatactggagacaaaccttataaatgtcatgattgaggcaaggtcttcagtcaagcttcatcctatgcaaaacataggagaattcatacaggagagaaacctcacgtgtgatgattgtggcaaagcctttacttcacgttcacacctccttagacatcagagaatgcacactggacggaaatcttacaaatgtcatcagtgtggcaaggttttcagtctgacttcactccttgcagaatatcagaaaattcattttgagataattgttccaaatgcaatgagtagagcaaaccatcaagcagtaattgacattaaagtgtttatgttaagaggattgggccaggtacagtgtctcacacctgtaatcccagcactttgggaggccaaggcgggtagatcacttgaggtcaggagtttcagatcagtctggccaacaaacatgagccacttttcccagtttgctttttgttctttaacaaaaactgatagggatttttatgggtaccgtgttgaatctaaatcacattgggttatataatcatttaacaatattaatttttccaatccatcaatatgggttatatgtctgtatatgtttttaatcatattgatgtatatttgtagatttcaaggtacaaacttctcacctttttacttttatttctatttctttaagttctctagcaaatggaagtgtttttaaattttcttttaaaattgtttattgttacaaacttctcatctttttgcttttattcctaagtatttcttactttaagttctctagcaaatggaagtgtttttaaattttcttttaaaattgtttattgttaatgtatggaaattcagctaatttttggtgctgatattgtactgtgcagatacactgaatctgtttattacttccagtagtattttggttgagtctttgtgattttctacacagaagatcatgtcatctacaaacacatataattttacttctttctttctgatttggatgggtttgatttcttttgctatttcattgctctggctaggacagccagtatttattgaatagaaggggtgagagcattcttccatcatgtgagatcctacaggaaaatcattccatgttccctgcttcgttatctactcgttggtcatttcatggatggcctttctattgttgaggtaaatttccttttctgtctattttgttcagaatttctatgatgagtggattttgaattttgtgaaatactttttctccatctattgagatgatgtggttttcatctttcattctgttcaagtggcatatcacattgatttgcttgactatgttgaaccatccttgcatcccagaaataagtggcacttgagtatctacagtcctttttacatcctcttgaatacagctttttagtacaaggggtcttcaagaagttcatggaaaaatacatattttgcatattatgagaaaattgtgtatgaatttcccagtttttgcaccaaaataaactggtacgaatctgttatgtctgaacaggtcctagtttgaggcacccagaaggataagacatgagttttaaaagagactttctctgccgggcgcagtggctcatgcctgtaatcccaacactttgggaggccaaggtgggtggatcacctgagatccagagttcgagaccagcctcaccaacatggagaaacagcatctctactaaaaatacaaaattagccaggcatggtggcaaatgcctgtaatcccagatactctggaggctgaggcaggagaatggcttgaacccgggaggcagagattgctgtgagccgagattgcaccattgcactccagcctggtcaacaagagcgaaactctgtctcaaaaaaaaaaaaaagaaaagaaaagaaaagagactctatcaaagcaatataaatcctgctaaaattgaaacaaaaaggagcatcaaatttacagtgagaccagatgcagtggctcaggcctgtaatcccagcactttcagaggccaagacaggtgggtcatgtaagcccaggtattcaagacaagcctgggcaacatggtgaaacccccttgtctacaaaaaatacaaaaattagctgggcacggtagcacatgcatgcagggccagctgctgtggagtctgtggtaggaggatagctcgagcctgggaggttgaggctgcagtgagctatgatcatgccactgcattccagcatgggtgatggagcgagatactggctcaaaaaaaaaaatacttcttgtaaagtttgggtagaggaataatgaaatcattgatgctttatgaaaagattatggagatgatgcccagaagaaataaacagtttgtaaatggataacttagtttgagttgggacaagacaatgttgaaggtgatgcatggagtggcaggcacaccatccacatcagtttttttgtttgtttttgttgttgttgtttttttgagatggtgtctcgctctgtctcccaggctggaatgcagtggtgcaatctcggctcactgcaacctctgcctcccgggttcaagtgattctcctgtctctgcctccttagtagctgggactacaggcgcgtgccaccacatcagctaatttttgtatttttagtaagacggggtttcaccatgttggcaaggctggtcttgaactcctgacctcacgatctgcccacctcagcctcccaaagtgtggagattacaggcatgagccaccatgccccttgcacatcagttttacaaaaaaatttatcttgtttgtgccacaatgaagaggactgacaggtaacagcagaaacaatagtcaggagtttgagaacaggctgattaacatggtgaaaccccgtctctactaaaaatacaaaaattagctgggtgtggtggcgggtgcttgtaatcccagttactcaggaggctgaggctgcattatcgctttaacctggggggcggaggttgcagtgagccaagatgggggcaataagagcaaaactttgtctcaaaaaaaaataaataaataaaaaataaaatatgtcaagccccttctcttcctgtctcctctcgtggtgtgtacttgactccccttctcgccagatctcacaggactttcagatttaagcaatacctggccaagaaacaaaagcaaaatcattccattcccccagtggattcagatcaaaactggtaataaaatcaggtacgactccaaaaggagacattggagaagaacgaagcggggtctataaggaattgcacgtgagatggcacacatatttatgctgtgtgagcattacaatcgcgttaccatatcaagctgaaaatgtcaccactatctggagtgttggaaatgttttattgggaatatgttttttctctgaatctgctatgaacacgtcagttgggtgggttcagtaataaatatgtgagacttttcatttcaaaataaaaaaggcaaatgatgtaattgcatagagtaccttaatttctgttttgcttttttttttttttttttttttgagatcaagactccactgggtcagctgatcacacctgtggtcctcgcactttgggaggctgagatgggaggattgcttgagaccaggagtctcctgggaatgttctcatctcccctaacccaattcatgagagacccttggactttactgttatggaaaaatctatattaagcaatatcagtgtgtcaaagcattatgtctgtcacaagctcgtgaaaggaaaataaaaattactaagccaaagagaaaagtcaacctgagaactgcatcagacaaacctgcctcccattttattcctaaatgagatagccacaaagactaaaataaagctacgtagaggccatgcacggtggctcatgcctgtaatcccagcacttttggaggccgaggcgggtggatcacttgaggttgggactttgagactagcctgacgaacatggagataccctgtctctactaaaaatacaaaaattagcggggtgcggtggtgcgcgcctgtaatcccagctacttgagaggctgaggcaggagaattgcttgaacccaggaggcagaggttgcagtgagccgagattgcgccattgcactccagcctgggtgacagagtgagactccctctcaaaaaaaaaaaacttccagcaaacatcatatgttataataatcctttgccacagaagagactcaggtatgataagttcctacgtggagaacaaaatatgagtttctactcggtcctcaggtgccttcccagagatgcccccacattttcctacagcagtggggatgtaggatggactgaccctccccaccacacacacacacacacacacacacacacacacacacacacacacaccctggggaaaagcccatataaagcagttcccatttccctccacaaactgcgggctcccagtgaaaactaccttagacattcttgcaaatcccattcttgtctggccttctacgggatgacaggggcctagagaaggcagtactgggtggagttacctgggtgcgcatttgtcgggatgtggcattttatggctattctaaggtctgttatcagttgtctgtcttggggagaatgtgcagtcgccatggtccaataatcctctatccaaggaccacacaggtcaccgcaggcgctcaatcagcgtgatccacatggtatgatgtgtgctctggcagggcacagacggacacactcagctctgtcaatgtgtaaacagggagtgttgcaatgacatggtttattcacagtcaccatggaatctgatgtggcattttaaaaaatgcgtagatctgttgcaactggtatgaaaacatcacttgtggggaaaagaaagagagatcagactgttactgtgtctatgtagaaagaagtagacataagagactccattttgttctgtactaagagaaattcttctgccttgagatgctgtgaatctgtaaccctagccccaaccctgtgctggcagagacgtgtgctgtgttgactcaagatttaatggatttagggctgtgcaggatgtgctttgttaaaaagtgcttgaaggcagtatgcttggtaaaagtcatcaccattctctaaactcaagtatccagggacacaaacactgcagaaggccgcagggacctctgcccagaaaagccaggtattgtccaaggtttctccccatgtgatagcctgagatatggcctcgtgggaagggaaagacctgaccatcccccagcctgacacccgtaaagggtctgtgctgaggaggattagtgaaagaggaaggactctttgcagttgagataagaggaaggcatctgtctcctgctcctcctgggaatagactgtcttggtgtaaaacccaattgtatattatatttactgagataggagaaaaccgccttagggctggaggtgagacatgctggcagcaatgctgctctctattacaccgagatgtttgtgtgcgtacacatgaaggcacagcacctttccttaaacttatttatgacacagagacctttgctcacatgttttcctgctgaccttctccccactattaccctattgtcctgccacatcccctctcccagatggtagagataatgatcaatactgagggaactcagagaccagtgctggcgggtgctccatatgctgagcgccggtccactgggcccactgttctttctctatactttgtctccgtctcttatttattttctcagtctctcgtcccacctgacaagaaacacccacaggtgtggaggggcaggccaccccttcatcactgattggccgggcgcagtggctcacgcctgtaatcccatcactttggaagatcgaggaaggcagaccacctgaagttgggagtttgagaccagcctgaccaacatggtgagaccccatctctactaaaaatacaatatcagctgggcgtggttgcgcatgcttgtaatcccagctattagtgaggctgaggcgggagaatcgctcgaacctgggaggcggaggttgcggtgagctgagcttgcgccattgcactccagctgggcaacaagagtgaaactccatcttaaaaaacaaaaaaacaaaaaaacaaaaaaccccatcactgattggtgaaagctattgaattagaaatgtaactctgcaaatatatatttaaatattgaataatgaatatctgaatggtgtgtatatacatatatattttgtatgtgatttcagatgcaattttagatattctatgaaattgatattagatattctatgatataaatggttgctttttattttagtgtttaaatgttttatcgttacatttgttcagatgtgtattttctatttatgaattgccacggtttagccagcagtttactacagcactcatttattttctcacagttcatagatgagaaatgtgtcaggtttttctgggtactctgtctggtctcacaaggccaaaatcaaagtcaaagccatgggttctattctagagactgtgggggcagaattcacttctaagctcattcagattgttgtcagaattcatttctttctcctggttcccatatattcaatatacagcatgtgaaatcactctcgtgctcctgagtcctaacttcctccactattgcatctctctgacatatatttcttctttaaggacacataggacccacccagataatccaggataactttcttttatttttcttttcttcttctttttttttttttttttttttgagcctgtcttgctctgtcgaccaggctagagtgctgtggcaggatctcggctcactgctacatccacctccaggttcgagcgattctcgtgcctcagcctccagagtagctgggattacaggcactccccaccatgcctggctaatttttgtatttttagtagagatggggtttcaccatgtcggccaggctggtcttgagctcctgacctcaagtgatccgcctgcctcggcctcccaaaatgctgggattacacacaggtttctctttcaaagtcaaatgaagctgggcatggtggtgggtgcctatatcccagctactgaggaggctgaggtacgaggaacgcttgaacctgagaggcggaggatgcagtgagccgagatcacgccactacactccagcctggtcaattgagcgaaactcagtctcaaaaaaaaaaaaaaaaaattcaaatgactgttagccttcattaatcagtaaattaccagccaaacttttggcaacataacataaacacaggagtagcaccaggagttggagacctggctacaacatcataggaccagtaaactttttggcactgagaaaataatatgtcaatctagctagaaaattattatcatttgggatatttctgttaagagaaactggtatactatatattactaaactatattggtgatactgtatttaacatagttatataactaaacatcaatataattatatagtaatatgtatttaaatattgttaaacaatgtttctatgaaatttctatataatttggtattcagttgtgctcacaagtccatttatttatgtatttatgtatttatttatttattttctgagaccaagtcttgctctgtagcccaggctgggcagcagtgttgcgatcttggctcactgcaacctctgcctcccgggttcaagcaattctcctgtctcagccttccaagtagctgggaatacagtcgcatgccaccacgcccaactagttttgtatttttagtagagacgggatttcagcatcttggccaggctggtctcaaactcctgagctcaggtgatccgcctgcctaggcctcccaaagtgctagcattacaggcgtctgccaccacacccggccatatctggacttcttatatacctccttctactgcggactctacctgtcaaactgaaatagaaaatactcacctgacccacccctctgtctggatggtgagctcagtgtgctggtcatgccagtcagcattatatgagagggcagcagccaggctgctagatatgggcttgtgattctgtgacctcacctgctgtcacaaccgcaatgatcattttacctgtcacagctgtgacagtgcagtcctgggaagctattcttttttaaaaacttcatttccctgttgtaattaccaagaaaacgtttactaattcctagatagcatctccaaagggattttggagtgtctggggagattctttcttcttgatccctggaggcagagagggtctcacaagaaggaagcaggaaatactgagctctggtacatcagggactgaacgcacaccaggtatgtctcagtggattctctgaatccctgagaagtctttccacccaaagtagatttccttataatatttagacctttgatcttttaagttatatgcagataaatggaatcaggcaaagtacctaagaaggattttgagagataaaaaaaaaaaagtaaaaggaagaacatgaagccattagttcacattagaaattttggaactcaccactctgtcttccagaaaatagacctaaagacagatataccatttgacccagcaatcccattactggatatatacctaaaggaatataaattgttctattataaagacacatgcatgtgtatgttcgttgcagcactattcacaatagcaaacatgaagtcaaccaaaatgcccatcactggtggactgggtaaagaaaatgtggtacctatacaccatggaatactatgcagccacaaaaaagaacgagatcatgtcctttgcagggacacggatggagctggaggccattttccttagcaaagtaacacaggaacacaaacccaaatgccacgttctcatttgtaagtgggaggtaaatgatgagaagagagatgcatagaggggaacaacacacactaggaccaattggagggtgcagggtgaaagaagggagaggatcagggaatatgactaatgggtactagaattaatacatgggtgattaaatgatctatacaacaaactcccatgacacacgtttacctatgtaaccaacctgcacatgtacccctgaatttaaaagtcttttaaaaatgaaggaaatctcacttaatctccaaatctaccatttcaatttatcaaatgcacaagatcccatggcttacagatttaattttccatatatattctatattaacacctttgacaaatctcaacacttactattttagttaatttatatactcattaatttatgagtatatgaactgaaaagaatgataatttctacccgactctattttatgatcctttagtatgtcacattacgtagttaggacatgatatcagattgtccattaattcctgtggtaggtgccatcgtactttctttcctggtgtaaaaagaagtaagtctctgtggctatcctgatatggggtcaatctttttaaatctaatttagtcgtgaggcagattcctataattttatactccaatcagtgtatctacattttatcaaggtctttaaagatttattcataattgctatcagtctatgggctaatattttatacatcaatggaaactggtcaaaaccaaaattataaaattaaatgtcacctgcgtaaaatatagagacaaggtataaaatagaaattaaatatgtggccgggcgcggtggctcacgtctgtaatcccagcactttgggaggccgaggcgggcggatcacgaggtcaggagatcgagaccatcctggataacacggtgaaaccccgtctctactaaaaatacaaaaaattagccgggcgaggtggcggtcgcctgtagtcccagctacgcgggaggctgaggcaggagaatggcgtgaacccgggaggcagagcttgcagtgagccgagatcgcgccactgcactccagcctgggctacagcgagactccgcctcaaaaaaaaaaaaaaaaaaaaaaaaaattaaatatgtatgttcattattggaagaaccccgctaactggctttgacagtagagcatggtggttaatgcactctgaaatcagcccagacaagatcagtccctattctactccaaacacggtgtgaatttacacaaatcatgtcacctctctgtgcttgagtcctctttgtctttataatggtggtacctggctcatagattatgaagaatatggaggtgaatacatgtctgttcttcatagcaaagagcaattcattgcaaatacacttaaaatgggacacatccaaatatggcaaactcttcatactagaaagtaactttattaagtatttctattgcatttcagctgactttattttttatttttattttttatgttttgagacagggtctcactttgtcatccagcctggtgtgcagtggcgggatctcggctcgctgcagcctcaatctcctgggctcaagggatcctcctacctcagcccccaccaagtaccagctgccttttaaatgtcgctcatgcatcacgttccctgcaggatcctgtgtctctgaagataagtagcagcctgtgggaactgacagaatggctgctgggatgtggccatgggaacgatcttcttatcgcagactgtacttggaatcctggggatttctctcttatttaccattatctgtccttttacatcactgggtgcaggttaaggtccacagatttgatgatcagacacctaattgtagccaacaccgtattcctcctccctagaggagtcccacagacaatggcagcttttgggtttaggcatttccggagtgattctggatgtaaatttcttttttgtgtccacagagttgtcaggggagtgtccattggcagcacctgcctcctgagtgtctcccaggccatcaccatcagccccaggagctcaggtgggcagagcttaaagggaacgcccccaagcacgctggctcctgtgtgttcctcagctggctcctccctggtcaatatcattgttctcatgcacgtgaccggcaagtggagcaacaaaaataccacaaagacaaaagatctgggatactgttctgctgctgatcacgaggacaccagagagtcgctgacgcggcactgctgtccttccctgatgtgatctgcctggggctcatgctctggggcagcagctccatcgtttgcatcctgcacaggcacaagcggcgggtccagcacattcataggaccagcgtctcccccacatcctcccctgagtccggagctaccaaaaccatcctcctggtgagcacgtttgtgtccttttacactctctcttcacctttcaagtttgtttggctcttttgaataatcccagtcagctggtggtgaacatctctgcaatgatcagtgcaggtttcccagctgtcagcccctttcttctcatgagtggggactcctgtgtatccaagctttgctttgcttagataagtaacacaaaaccccctaatcttatcagaaatatgtgaattggacatgtttgtacaatgtttatgtttcttcattgatctctagagacccataaacacggttatgaaacgaggcttgttagtgctgtgcttgccagcaggggccactgttttattctgtacctcctgatcccccctccacccacaccgccctggagcagctctgtggaaaaagtggaatcagcttagaggttttcgggaggaagacactgaaacgtaaacgttataagaaagtgacggtgcacaaacacacgtgcctcatctctgtgtccctcggagtagacggggggaatgtgcgcagatgcgaagttcttgctgtcattttcgtgatgaatagtaaaatatatattttctcagatccagaaatctcatgccctcagtcaacatccataaactgacaatcttacttgttggcttgcaagtaaggttaaaatttaaaaccttttgcaatttctgataggtttggtgatgctgggacagatgtgactttgtgtaagaggaaggtagaaaggttcttcaccggtgtggttagcggacagaaaacggctttctggaacaagcagcaaattctctcacccaaactggagtgaaatgagagtaaaattcctccactctctaaccctggaatggggctgttgtgtgagagggaggattgaaatgaactgtccgaatgtgatttatttgttgctcattctcctcctggcaggagcaggaaaggacgaagagtccccgaagctgatgctgagttcatggggttgagctgacagcggccaacaggctgtcataaactgtaagcacacgaggcttgttagtgctgtgcttgccaggagggagcagtcttttttttctgtaccttctgatccctccctccacccacaccgcactacagcaggtctgtggaaagagtggaatcagcttagaggtttttgggaggaagacattgaaactccgttttttcattttgttgtgtttttgtttttgtttttagatggaatctcactctgtcccccaggttggagtgcaatggtgccatcttggctcactgcaacctccccgccctgggctccagcctcgtgccatgtttcccaggctggtctcgagctcctgggctcaagtgatctgcccgcttgtgcctcccaaaatgctgggattacagacgtgagccaccatacctggactgaaacacttttagtcctgttgcatgcaaggatttaagtcaccaacgtacgtggattccagcaagaagggtcagtagacgcaggggtgggtaaaggtgctaaggatggtggggtgaagtgtggctgcaaacaggcagaaagagacaagcttctggccctgaatagtcaccaaatgctggatggtgcaatgctaagaatgcagcagaggccgggcgtggtggctcacgcctgtaatcccagcgctttggaaggccaaggtgggtggatcatgaggtcaagagatcgagaccatcctggccaacatggtgaaaccccctctctattaaaaatacaaaaattagctgggcgtggtggtgggcacctgtagtcccagctactcgggtggctggggcaggagaatcacttaaacatgggaggcggaggtcgcactagccgagatcgtgcctctgcactctggcctggcgacagagcaagactccatctcaaaaaaagaaaaagaaaagaaaaaaagtgcagcgcagaccatggtctgaaaagctaaaaaagaatcacaccggctgggtgcagtggctagtgcctgtaatcccagcactttgggaggccgaggcgggtggatcacgaggtcaggagatcgagaccatcctgcccaacatggggaaaccctgtctctactaaaaatacaaaaaattagccgggcgtggtggcgggcgcctgtaatcccagctactcgggaggctgaggcaggagaatggcgtgaacccgggaggcggagcttgcagtgagcggagatcgcgccaccgcactccagcctgggcgacagagcgagactccgtctcaaaaaaaaaaaaaaaaaagaaaagaatcacacctcccccattgtcctggcccctaccacatacacactctctctctcctctctctctctctctctctctctctctctctgtctctctctctctctctctctctctctctctctctctgtctgtctctctctctctctctctctgtctctctctctctctcacacacactcctatcctagcttcctctggtctactggcccttcgcagtcccttacccatgccattgtatagtgtattatacttattagtctgtgattacacggagaaaaaatacaaaacacaaaaacaagaaacaaactcaacagacagggtttaggcagggttcccagtgagggcggaaagagggtcttttgtgctaattcaatgtcctgttcggtttctgcatcagaatagacagtaggaattgatgtgttgtgtgtttttgggcttcgtgtccctatgtaccagaggaaattattccagtctgggttgggtgcaggtagggacgtgtgagactaactctcctgccatttgccacccgttgggggcgagtcattaggattcctatgagtgcctctagcctctgatgtcccaaatcctcactatgcagatgatgttgtgtgtctcggcaggtgagaggagttgctctcaatcttcctgtgtggggtgtgatccccgccctgccagcagaggtaactgacagaacccaaagaaatgcagccttctgttttccggggcaggcttattgaaagtatgtgagcagacttacattgctcaatgatttcagtggtcgacaaaagttgtagatgacaaaatgattttgtcatctgcagcctctggaaaagggaggcagcctccacctagaggtgcctgtggggtcctagttgccctgacgcaatcctgacacaataatagtcacgctgattttgaacattatctgttactttgctgctgagctctcgtcatcaccaaatcctgtcccacagacagcttggggctccccaccttgatattccaattttgagatgggttagtccaaactctacaaaaccccccgaaagccttgcttatgacacagaaatggtgtattctgggaggaaaatggaccggcccagcaacatctcagctctaaaggaaaaatcaagatctatcatcggtgaaaattttatgcccttctccacggtctgaagcaaagctatggcattatggggtcccaaatttaccatgtaacccctaaatgcctggtccaggttcactgatgggtcagggaagtagattcctcacggtggccacagcagaggctgttcgggctcagtgccagccacgtggaacctgcagcaggggcgtttgttccgctcaacggtcagacttggggccaggtgtgggggctccagcctgtaattccagccttttgggaggctgaggtaggcggatgtcttcaggccaggagttcaagaccagcctggccaacatagggaaatgccatctgtactaaaaatacaaaaaattagctggacgtagtggcaggcacctgtgatcccagctacttcggagactgaggtgggagaatcgcttgaacatggaggttacaaaaaaaatcatcaaaactcagggttttggccactgcccacattctagctgtttgttcatccccattcaaactagagactgtctgaggaagcataccctctttgaggctgcaaactggaaacaatctcagctgctgatctaacagttgcatccgtgatttaggagtccatggtaaaggactgttttctgaagcacctgaccaaaatcaagctctggacagagcctgaatctgtctcatgcagagcttgtcactgcaggccgggcttgtggttcttggtgaaagttgatctgtttatctggcggttggggaggcccctgaccattcctggcagaatgagtgcattggacttttgacccacttctggaggtttcaatcatgtcacgccagctgactccagccgcaccacgtgacccttgaaactcattcatgtcaccttttagacttttgggaccattttcactctgacatactgagtctttaatcactaaatctactaaaaatgggccaactgtctgattttacttccttgtttcccctcttgatccatcaatgttgtttagggaatttgttgattgaatgtggctgtctccagaaggagacatccttttggatgtctcttcttgacgtgatctcttcttgacagcctccaggaatgatctcttcttgacagcctccaggatcaggatgaaatcactgggggttatgaatctatttccaaaatatgagatttctctctctgaccattccaggcacaatatgtcattctttctctgaacaggccagtctactttgcccacgatgagtggcagcccagctaaaagcgagttatgggactcaaagttagttacaattaagttttatacaaaaatctttatccctgtttcaccttgctcttagggacaaaatgtcttggagacagtaggggatcatgagaataaagatgaaattataggtaccagaatgggactgactgattctgtggagggagagggagagtgacaacctgaaacctggagagcagtcaacttaggtcctaggagcactgaagaatggagggacattcatcaccttttttccctcataatcacctccgtgagtcccagaaagagtctccctggaaatgatgttgggccaggactgtgttagtttcagttaagccagatgacagggcaggtgctgggggttcctgtgcgtttggtctccacgtcacccagaagaatcctttgggactgttccctccctctgggattctagtgaggagtgtgccctttcggtacccatctgccctccttcctctgtgagctgcgtctcctcctcctgtttttcttccacgtagagatgaatgtatgtttattcctatttggataaaccagagaaacaaatcaagtaatggaaccccagacccagcctccaacatagcctgattcttttctgttcctcttcccactgtactaatttcatcatgtcggtgcagagataccctgaggtggggtctctcagaacagattgcaacaccatacgtgtagagaaggtggttggagatggcaggagtccaatcctgccaatcctgagaatcaaagcttgtgtctgatactacaagtgtatacacaggaagtagatggatccaggaaagatcctagagcccaggaagagattatttagagcaggcaggatccctgcaggagagcagagtagcaggacacaggttcagcagccacttccgaggtcagattctcacagctaagcctctgtggtagggctgatctgcagagcaatgcagagcctgggaaagctctgatcacatgtggaagatgaaactctgggcttctattagtctgttttcccctagctacaaagaactacctgagcgggtaatttatacagaaaagagacttaactgaatcacagttccacatggatggggaggcctcaggaaacttacagtcatggcagaaggggaagcaaggtatgtcttaccattgtgaaaaggagagacagagagagtgaagaaaagcacacacttctaagccatcagatctcgtgagaacgcactatcagcagaacagcaagggggaaatccgcccccatgatacaatcacctgccaccaggcctgcccctggcacgtggggattacaattagacatgagatttgggtggggacacagagtaaaccatgttagagctcatggagaagtgtcctatgtgatggaacatcctgcttctgtgggcgtgacagtctttgctctttcttggcagagaaacacttacaatagtcacttgaggaccatgtatagataggctttctttcttctgagtttcttgaaaaaggattcagaggaaacattttacccactttcagttcgagtgatggtggggagtgacttcagtaaaaatggcagattagggaactcggggtaggagtgggagctgtccatccccagaaatctcagaaggcccagcacaacctgccagaattaacctgatcgaaacttgaacttttttttttttttttttgccatgtagctttattttaaatcagacctttatcttactatgtgttgtaaagaatcgattttgtcactttgtaatgtgtcttatgcactgcagtctatttctgagttgtgagctccacccatctatcagtctgcccatcaaccaacatgtcttacaagactagctaccctcatttcgttctttttcagagttttcttgattattcttatttgtgttttcacctatgagattcttgcaataacatccataactcccaactgaatgtatctatatttgaaccaaattaaatttataaattagcttatgagcaattgatttttataatattgattttttttacccaagtccatgctgtaacttcttatgtgtacatttgtatatttcagaaattttctatttaattcttatatacatttaacatatttgttaaaattattcctaagtatattttattttattgttattttgtaattgcatccccaccccaaatctaacttgtaaattattatctcatatatatgtaaatacctgctgcgtgtaatttaaggccatgtcatgggttcaaactgattcctaacatcaaccattcaattttccccattcactggaatgactactattccatatccacaacaagagctgttgggttgagggaaatcagggtggagatgaagcaaaagtgaagagaaaacattatctaacccacgcatgcagcaaaacaacctccctatggatcaatatgtaattatctaaagtataaaatacttagaaaatattaatatttatctcatactatacaatatggaaattataaggaaaagacaaaagaatacccaattacttatatattccctacataaaaatatatacatttatatggtaaaagattgcattatcgcagtgtaaaatgaaaataggaaaacatataacaatatgtaaaacaagtgacaatatgtatgttagatttaatatcctatagtaaaacagggtaaattaaaactataaaatagaagaaaatttaaatccaagtaaatcatatgagccaaaaactaaataaactaaataaatataatcaataagcatttaatacatcttgactcagtttagatataaaagaaagaaaaatcaaacaataacatggtggttttgccatgatgtcatcaagcgtaaaaagataacctttctcaatagagatgcgtctcaggtttgtgggtctgagtccctcatggactgcaggtgagagagtgaagagacacagccttttctcaattaaagtagaaggatataaatatatatatttatttttgctatactttataatatacaaacacatatggatgattacaccctaatatttgctgtgattctacagaaatgcatgactctcaggagacatccaaaagacagcaaatatctcacacgaaactgaatagtgaacttcatcctcaatgaaccacagagttcaccattctgagtatatcgttcaagttattttcctattttccttccgcaggttctagcatgtattaacaccgtgtgtctaaagtcatccctgctggtcatctggaggaatctgagaaggggcaggtctttcttctgactctcagagcagcaccctctgctggacagggctgggcacctcatctcaagcccaatctgatccaccaacagggtctgttatctccggtccggggaagaggtgggcctctctccatcctgggaggagcgctgagcttctccttcatccagggatgggccccagggacgcgccagtgggactgggagaagccaccctcagcagggaagacagagatgcctgcgtggccgaggcctggaaggtctgcaccatggtgcacagaggccccggagctgggtgaggccagaaagctgctctggggtcagcggggaatgtgcctgctgaatctgcaagcacctgagctacgtcttcacaaatggcctcagacctagagtgcagggagatcccctggcttttctgaagtggtggcaggtggtctcctgggtagcaggatctgggctgcttacttcccttacccagtgagggcccgcggggagctcttaagttgggcatcatgggtctgcgtgatgtggctgctgtgcccacatcagagggtttttgtttcttttccaaagtcaagctgcactaatctagaccagggatccccacccctgggctgcggaccggtccccatgggtggcctgttaggaactggaccgcacatcaggaggtgagcagtgggtgagggcgcatgaccacctgagctctgcctcctgtgagatcagcagcgccactgcatctcagaggagtgccaaccctactgtgaactgtgcatgcgaaggatctgggttgcatgctctttatgagatcaaactaatgcctgatgatctcaggtggaacagtttaatcctgaaaccatccccccgtctgtggaaaaactgccttccaccaaaccagtccctggtgccaaaaacgctgggaaccgctaatctagacagttctctgctaaggaagcacatggttgagaagcatcagaatcgttcccacggaccatgctccggagtctcagcaggctcctgcaggtgagccccactggcctctcctcttccttctggacctcctcagctttggtaatggaaagctgcatcctcttctgtccccagttcctctctgggtgtcaggatctctaaaaccctctcagccgctgagaaatctgtctgtctgtctcacagtgtgtttatccgtgcatcatgaaggaccctcatacggctgacgtgccttggctgatgcgaataacactgcagcaagcgtgggagtgcagatagctcttggaaatacccatttccttcagacgcatactcagaggtaggattgctggattgtttggtcattttgatttttaaaattaaaaagaattttaattctcatattgttttgagtaaaattaaattataacttgtaaggcaactccatgttttttagaatttttaaaaatataattgctctaccaattgactgtcccaacaacaacgtacaggggtattttttttcctccgcatcctcaccacttgttaccttttgtctttttaataatagcaatcctaagacatgtgaagtgatacctcactgtgattttgattggcattttccagatgattagtctattcaggccctttactttttttcgttgttgttgttgtttttgagatggattctcactctgttgcccaggctggagtgcgatggcacgatctcggctcactgcaacctccgccttccggggaggcgtgattagccgccacacctggctaatttttgtactttagtagagatgaggtttcaccatgttggccaggctggtctcaaactcctgacctcaggtgatccactatgcttggccttccaaagtgctgggattacaggtgtgagccaccacgcccagcccctttgctcatctttaatagggttattactattatcatatttgcttttgagttgtgggtgttccttatatattttggatataaactccttatcacgcatagggtatatatggtttaacatattttctcccattatcatgccccaatatcactaagttatatttcacagctccctcttgaacacctgaaaaaattcctaatatatttccatgtgtctgtatccaggttattgtggtttttgcctgaaaacacatttatatatgctgatattccccaataactaatatattttttctctgtttttttttgagacggagtcctgctctgttgcccaggctggagtgcagtggcacgatctcagctcactataacctctgcctcccaggttcaagtgattctcatgcctcagcctcccgagttgctgggattacagacacatgccaccacacccggcaaatttttttgtatttttagtagagacggggtttcaccatatcggtcaggctggtctcaaactcctgacctcaggtgatccacccgccttggcctcccgaagtactgggattacaggcgtgagccaccgcgcctagccctaactaatatattttaaataactttttgctcttggcacatggactaaaaccacatcactaggccttcaatgacgtccaatgtctgccatcttatttccactccagctccgccccaggcatagttgcttttctttttattgaagccttctccttttttttttttttttgagacagagtttcacactgtcgcccaggctggagtgcagtggcgcgatctcggctcgctgcaagctccgcctcccgggttcacgccatcctcctgcctcagcctcccgagtagctgggactacagaagcccgccaccacgcccggctaattttttgtatttttagtagagatggggtttcaccatgttagccaggatggtcttgatctcctgacctcctgattcacccgcttcggcctcccaaagtgctggattacaggcgggagccatggtgccccgccaaagccttctccttgccaagttaattaaagagaatgttttcttcatcaaattagaaattacatcctcagagaagctttccagtatttgtagttcttacaggccacatttattacaagtttatagactccaaacttcttcactgaacagttaataaaaaggacacaggcttattgtaaaataattcatttagtgcctgccattctgattacactagaaatttagttctcctgctccgcgttctgttatgtgactgttcaatgcattacttaaaactgcaagattgaatagagagatcagcttctaacattgatgaatgcaaaccacaagaaaccaagtctcctctgcaaaatgatgaaaacactcgcaaagtcactaaaatcaatcatttcagacttctgaaatttaccaaagccacagaacaaagtgaaaagtatctatcccacagaaagtaccaaacttcagtaagacagcagcatttgtgtcattttaacatgggcatttctgtcaccctccatccttcgttcattgtggagcactgactttgtttggttggttgtttgtttttgagacggagtttcgttcttgttgcccaggctggagtgcaatggcgcgatctcggctcattgcaacctccgcctgctgggttcaagcaattctcctgcctcagcctcctgagtagctgggattacaggcatgtgccaccacgcccggctaattttgtatttttagtagagacggggtttctctgtgttggtcaggctggtctcaaactcccgacctcaggtgatccgccttcctcggcctcccaaagtactgggattacaggcatgagccactgtgcctggctgccctgacttctttcgaagctccttttaaaccctttctgtctccatcttcatgttcaccacagtattatttgctatggccaagacacggaaacaacctaaatttccttcaaaggacaaatgggtaaagaaaatgtgatatatacacattaaaatattattcagccatgaaaacacagaaattctgccatttatgacaacaagaaaaaagctggtagatgttatgccaagagaaataaggaagacacagaaagagaaatattgcatgatattcatttcttcatttctggggaggcctcagaaacgaggtccttactaagatgtggcaggctagttttgtattttagactgctcattaaaatatgtatttattgggccgggcgtggtggctcacacccataacgccagcactttgggaggccgaggtgggcggatcgcctgaggtcaggagttcgagaccagcctggctaacatggtgaaacgctgtctctactaaaaatacaaaaattagctgggcatggggtgcgtgcctttaatcccagctactcaggaggctgaggcaggagaatcatttgaacccagcaggcagaggttgcagtgagccgagatgggccactgcactctggcctggacaacagaacgagactccatctcaaaaaaaaaaaaaaaaagtattaattgcctatggttttaaaaaatgcaagtagtttctgaaggataaactgaagactcttaaacagagcacttctgttttctgagtcaacctttcttgttcagagaatgaaaagatccaggatgcctcacctaacacccaggagggtccctgacttcctgattctaggccctaaacctatgtccaagagaaaagttacatctgtagtccagagctttttaaatatagttatccaggcccctaaacagcacaagaaaatggaagctaactccttacaacttgtgaaagagacaaagtagctgctgcttttttgttgcttattttggattaattaaagtgacatcttttttattctactttcttatttaaaaattaaaaaacaggttgtgttgacttacacacttctccataaaaatacaatatattgattcaatatgaaatgtctactttagtgccagataaattgagaatttgtataccaaattttaacaaatttgatgttctcaaaagaaacagcattattcactttgtttcagatgagactgggcttatgttcacaagtacacactcacagagatctaattccacaggcacacgtggtagagtaggctaagatcatcatggacagtaatgacttgcaatgccatttgacaaatcccccaacagagctctgtaaaaccactagaaaacgcgcacaacagcacaaccatcaaaatgaaaacacctgatgtacagagttgtatagtagttgtatagttagtagttgtatggagcacccttgacataagtaactccatcttagaaaaagactccatcttacatttcatggggcactttgccaacagggacaagatgttttgcttagtaaataaataataaggactgcatccaagcagataaggacataaacaagcacattcttccactatcagtcctccccacaggactctggccataaaagaagctgggcttcagcagctcaaaacggccatcttaactgccaaccatcctgctgtcatttgtgataagcacttgacatctgctgccaaagtttctacccacatcaaagattcttctttgcaagatcaacagacaactcagcccagaccaggagactgtttatgtcttcattactctccccacgcaggttcaagtctgctgagatttggtttatctctgatttattagggagaattggctcacacgatcacaaggcaaagtcccatgataacccatctgcaagctgaggaagaaagaagccagtagtggctcagtccaagtccagaagcctcagaagcaaggaagccaacagtgcagccttcagcctgtggccaaaggcccgagagcccccagcaaaccaccagtggtccagagataaccaggtccacacacgtttgtatctttccacagtgtcaggctttgattgatgctatttcaatcacaaaagccatgagccgcctggagttcccaaagaggcttgtgatggttaatattaagtgtcaacttgattggattgaaggaagcctaggcagctggtaaaggattgtttctgggtgtatctgtgagggtgttgccagaggagactgatgtttgagtcagtggatggagagaggaagacccaccctcgatgtaggtggacaccatgcaattggctgccagctcaggtagaacacagaaggcagaagaaggtgggatacctttgcttgctgagtcttctggctttcatctttctcccgtgctggatgcttccttctgcttctcctgcccttggacatcagattccaggttctttggtctttggactcttagacttacactggtggtttgccgggggccctgtggcctctggccacaggctgacgactgcacagttggcttccttgcttctgaggcttttggacttgaactgagccactactggcttcttttttcctcagcttgcagatggcctatcatgggactgggccttgtgatcgtctaagccaattctccctaataaacttcctttcctatagacatatatcctattagttctgtctctctggagaaccctgactaatacaaggcaattctctttggtactgccccttcacttggtagtcagagccatagacacgcaggctcaagccacttcacaagtcagtcaatattgcaaaccatacatagtagtgtacttaatcaatatatataaatgttatagattaaacatttcacaataaacaaagtaatgtttaacatcaagagaaaagagataggagaaaagggttaacaagtcagtccaaggagagtaacaaaacccttggtcagggctgggcaggcccattggtcttgcaagaagtctttgaggcttcagcagcagatgccaagtgctcatcacaaatgacagcaggacggttgcagttaagatggttatttcaagccactgaagccttgctccttttatggccacagagtcctctggggaggacagatggtggaagaatgtgcttgtttatatccttatctggttggatgcagtctttattatttatttattaagcaaaacatcttgtccctgttggcaaagtgccctgtggaatgcaagatggagtctttttctaagatggagttacttatgtcaagggtactctatacagtagtcttacccacacgttcatagaaacatacaatctcatccatgtcataatgaaggccaaaaacctcacaggcgccctcccttacctgagctccaggaggctccctgatgagtccacacaatcacaaatccagtcacacccaccaatgattctctcccaacaacagcatatattttttagggcaaagcatctcacaccccagtgtttgtctaaattgcaccatttcggaagccccctgctcttttgcagaccttggtcaaagtgaaacatttcacaggggttcaggcagtgagaaatatcctgcctaaccacctgaccacaaggcgaacaaagacccaattaaagaaacattctcatcatgtcctactgggcaaaggcccaactacaaaaaccatccctatcatatctttcttggcaaaggtccaaggaacatcctgatgagatcccaccggaaaaagggccaaaccgcctgatcataagaacatcttgtcaatatcctgccgggcagcaagccatacagcccaggcctctcccgcccataccaaggtaacactcacagagacatctgaagagccaggcagtgctcccaagtctgggacagcatcagagaacgaaacgcaaagtcctgcccttacagagagagccttggcacagacccagtcaggaccaggtcactcccgtggaacctactcaaggtccctacacacatgcctggagctccccaatctactggggggtgggggaaagggcagtgctgaaacgtccccaaaatctcacatgtaaacaccctacctaacactttctagaggcatttccagctcggggctgtatttccaagaacgctctggaggcacagctcttttctaaggagggccatgttgcatgctgggaaatttttgaacttttcccaaatcacagcttttaagctttccgggcttattattattattattattattttgagacattgtttcactcttatcgcccaggctggagtgcagtggtgtgatctcggctcactgcaacctctgcctcctgggttcaagcgattctcttccctcagcctcccaagtagctgggattacaggcacacaccaccacgcctggctaatttttgcatttttagagcgatggggtttcaccatgttgggcaggagggtctcgaactcctgatctcaggtgatatacccgcctcggcctcccaaagtgctgagattacaggcgtgatttctggtcgtttcagactacatttccttcccagaaggacgcggggacacgccttccctatggacggatcccaaatgcaagttgtaagcaattataactgtaggcccctagagcctgaaccacttttcccaggaattttttgtggtgcgccttaggagcaagcaaagtttcagggcaggagaaggccgacagggcttccagcatttgaagattctgccagtctgaaatacgctttcccagaagtctatggggggtgcagctgctctaacagtgggaggagacaccgacgaaaagcattctgacggccgcgcttccagcgctaaggattcccgcgtagtgagcatttcccagaggtctctggggcatggctccattagggccgtgtgcagttgcctgcagggaaacactgatgggcgcccttccagatacgtcgattcccgggttatgagctacatttcccagaagccctcaaggcaggacgcccttagggtcgcgtagagttgcatgctgggaaatcctgacagccgcttccaactctgtggatttccgggttatggactacatttcccagaggcctctgggtcacggctccatttgcgccgtgtagagttgcatgctgggaaacactgacgggcgcccttccagctgcgtcgaagcttctctggtttcgcattacatttcccagagggccttggggcacagtccaatgaggagcgagccgggtggccggctgaggggcgtgcttcatgctcgcgggatttttaaaaatggtttctcctggatcttatcccaactgcgcctgagaccttgtttcacctcctgatgtgctgggtgtggttaggcctcgagccgggagctatttgcctcccaggaggaagccagggcagggttccgcggggaatggcggtgagggagccactcgggacgcggaggccctaaaatgaagaagcttcggcctgaggcttcgggagcggcgagcagggaagtgggagtgtgtgtgagtgtgtgtgtgtgtgtgtgtgtgtgtgtgtgaataagccagaggctgcctggtggggccccgccgtggcccagtgactgagataattgtcttcgtctgtggggtaatgcgaacaagccccgttcccctaagccgtgatgcatgcggggttgacgcggccgggctctgtccccataaactgtgacacaggtgtgtgtagacgtctatgagggccatagcgccgggctgtaagggcatctgtaggggtgacgcagccgggctgtgtctctgcacctccgttctgtgcgaggtcaatgctggtggggtctgcagaggtggcacggccaggacgggtctccgtgtctctgaaatgtgcctttgcacttctgtcaggttgacagggacaggcagtgtccctctggtgtgagcgtctgtgggtgtgaaagggccagcgagtgtgcggctgtgactggtcgggatcgggcctgggtgcatggccttttgagtgagcacaggtgtgtgcgaccatgtcacctgtctttctagtgtctccgttgcttcctgtgccttggccttccagccatgtggtacctgctagggagcagtggtcccaaagtgacgtgagaggctctacgctattgtgaaaatgaccaagaagaaggcttcacaagtcacgagatggcagttttggagccagaagtgctctccgtgcacactacctggacgacaagaggaagtaacctcaagaatagaattccttttggggaagaaagaggtacctgacatgggaggcggggaggtggtgagaggggcagctccatgtttcagaaccccagttcctagagttttccagcatttctctgaaaaactcacatgcctgtgccctcttatttctgattgattttaactgtggtctggggacaagtgtgccctattttctttctttgttttttttttttttgagacagagtcttgctctgtcgcccagggctggagtgcagtggtgcgatctcggttcccaggttcaagcgattctcctgcctcagcctcccaagtagctgggaccacaggcgcacgccaccatgcccagctaatttttgtatttttagtagagacgggatttcaccatgttggcataggtgatctcgatctcttgacttcatgatccgcccccgtcggcttcccaaagttctgggattacagttgtgagccaccgcgcctggacgtgtgcgctattttctaacgtagcttgtgatccagaaaggtcctggtgcctcattcttatcttccttttcccctccggccagctggccttcaggaaaagcatcccggaggaggaagaagaagtgttatatgtcctaaagtaaggtttcaggtgagttagctttttgttcattcaatgatttgtatttatacaacttaagactatttactttccttgggcccatttcttcccaaatagtcatttatcccactaattcctccccaagggatgtgacagggcggtgcaggtcattcctccgtgtatactccattgacctaccctcttctaaaatgtctaaaaattgtctaagaatctgatggtacagaagagattaattctaacactttatattacagtgtggtttggtaaggaagggatttatttttgggtggaaggaaacaccagatatctttggtcttttgtttattttttattattgtagttattttttaacatggttaattttttaaatttttatataattggcaaatgacaaattgtatttattgtgtatatgtttttatatatatgtatacattatgagatgattaaatcaggctgatgaacatatccatcacctcactaattattatttttgtcatgaggacatttaaactctactctcttagcaattttcaaatatactatattttttttttattttttttttcttttgcccttgtcccccaggctggagtgcaatggcatgatctcagctcactggaacctctgcgtcctgggttgcagcgattctcctgcctcagcctcccaagtagctggaattataggcacccaccaccatgcctggctaatttttgtatttttagtagagacggggtttcatcatgttggccaggctggtctcaaactcctgatttcaagttatctgcccgcctcagcctcccaaagtcctgggattacaggtgtgagccaccatgccctgcctttgtcccaatttttaatcaaatttttttttcacactcttgagttgtgtgagtttcttatatatcgtgaatattaactgcttgtcagatgtatggtttgcaaatatttccttctactccataggttctgtcttcactctgttgattgctctgctgtgcataagttttttaatgatgcaattcatttgtctgttagccaccatgcccagccttgatttctttttcaaatagttgttagtctatagggatactattttttttttatactttaagttctagggtacatgtgcacaatatgcaggtttaatccataggtatacatgtgccatgttgttttgctgcacccatcaactcgtcatttgcattaggtatttctcctaatgctatccctcccccagccccccaactccgacgggccctggtgtgtgatattcaccaccctgtgtccaattgatctcattgttcagttcccacctatgagtgagaacatgcggtgtttggttttctgtccttgtgatagtttgctcagaatgatggtttccagcttcttccatgtccctgcaaagggcatgaactcatccttttttatggctgcatagtaatccatggtgtatatgtgccacattttcttaatccagtctgtcattgatggacatttgggttggttccaagtctttgctattgtgaatagtgccacagtaaacatatgtgtgaatgtgtctttatagtaccatgatttataatcttttgggtatatacccagttatgggattgctgggtcaaatggtatttctagttctagattcttgaggaatcgccacactgtcttccacaatggttgaactaatttacactcccaccaacagtgtaaaagtgttcctgtttctccacatcctctctagcatctgttgtttcctgactttttaatgattgccattctaactggtgtgagatggtatctcattgtggttttgatttgcatttctctgatgaccagtgatgatgagcattttttcatgtgtctgttggctgcatagatgtcttcttttgagaagtgtctgttcatatccttggcccactttttgatggggttttttgtttttttcttgtaaatttgtttgagttctttgtagattctggatattagccctttgtgagataggtagattgcaaaaattttctcccattctgtaggttgtctgttccttctgatagtagtttcttttgctgttcagaagctctttagtttaattagatcccatttgtctattttggcttttggtgccattgcttttggtgttttagtcctgaagtccttgcccatgcctgtgtcctgaatggtattgcctaggttttcttctagggtttttatggttttaggtctaatatttaagtctttaatccatcttgaattaatttttatataagatgtaaggaagggatccagtttcagctttctacatatggctagccagttttcccagcaccatttattaaaaacggaatcctttccccatttcttgtttttgtcaggtttgtcaaagatcagatggttgtagatgtgtggtgttatttctgaggcctctgttctgttccattggtctatatctctgttttggtaccattaccatgctgttttggttactgtagccttgtagtatagtttgaagtcaggtagtgtgatgcctccagctttgttctttttgcctaggattgtcttagcaatgcgggctcttttttggttccatatgaactttaaagtagttttttccaattctgtgaagaaagtcattggtagcttgatggggatggcattgaatctataaattaccttgggcggtatggccattttcacgatattgattcttcctgtccatgatcatggaattccatttgtttcctcttttattttgttgagcagtggtttgtagttctccttgaagaggtccttcacatcccttgtaaattggattcctaggtattttattttctttgtagcaattgtgaatgggagttcactcatgatttggctctctgtttgtctgttattggtgtataggaatgcttgtgacttttgcacattgattttgtaagggatactattgattttttaatgttgacgttgcatactacaactttactgaattcatttattatttctagtcattttttgatggagcttttagggttttttatatgtataagatcatgtcatctgcaaacaggaacagtataacttcttcacttcctatttgattggcttttctttttgttgcctaattgctctgcctaaggcttctagtactacattgattagaagtggtaagagtgggaatcctcgtcttgttcctgatatttcaacttttcaccattgattatgatgttagctatgtgcttgtgttatatcacctatattatattgaggtacattcctcaatacctaatctgttgagagtttttgttaggaaagcctgttgaattttgtcagatgctttttctggatctattgtgatgatcatatggattttatccttcattctgttaatgtgctatatcagatttatagatttgtatatgttgaaccatccttgcattcctgggataaatcccgcttgatcatgttgaatgatcctttttatatgctactgagttcagtttgctagtatcttgctgaggatttttgcttttaggtttatcaaaggtactggccggtgatttttcttgtcttgcagtgtccttgttgggtttggtcatgctgttcttataaaatgggcttggagatagtcccttctcttggattttctggaagagtttgagaagcattgtattaggtcttcgaatgtttggtagaattcagcagtgagggcatcaggttctggtctttcatgggagatatttattgcttattcaacctccttacctgttgttagtgtgttcagattttgtatttcttcatgattcaatcttgatagattatatattactaggaatttattcatttcttctacattattcaattttttggcgtagaaattttttttttcttttttttttgagacggagtctcgccctgtcaccaggctggagtgcagtggtgcgatcttggctcactgcaagctccgcctcccaggttcacgccattctcctgcctcagcttcccgagtagctgggactacaggcgcctgtcactgtgcctggctagttgtttgtattattagtagagacggggtttcaccatattagccaggatggtctcgatctcctgacctcgtgatccgcccacctcggcctcccaaagtgctgggattacaggcgtgagccaccgcgcctggcccgggaactaattttttttataccaggcctgcattgattgcattataagaaatataacttgctgggcgcagtgcctcatgcttgtaatccagcactttaggaggccaaggcaggcggatcacgaggtcaggagtttgagaccagcctgaccaacatggtgaaaccccgtctctactaaaaatacaaaaattagccaggcatggtggcatgtgcctgtaatcccagctacccaggaggctgacacaggagaatcacttgaacccgggagttggaggttgcagtgagagccgagattgtgcctgggtgacagagcgagactccatcttaaaaaataaaaaaaaggaaatataacttaaggaagtcctgaatttaaaaaaatgattactcaaggtaaaaaaatcagagttatgaaggtgctggtaccttgtagttattaataaatgtttgaatggataggcttgtgggaagcataacaagtgtatctcaaaaatgtccacaccctaattcatgaatgcaggaatatgtgatgttgcacggcaagggaaatttcagttgtagatggactgaagttattaatcagctaaccttaagatagggagattatcctgaattgtgccagtgggcccaatgtaatcacagggtattagaagtagatgaggggtgccagaagaagagaaagaggtgaggatttactgttaactgtatttactgttaacattttgttaacaggtatgtgtcctgtctcccactcccccactaaacacgtgtgtatgtttgtttctggaacattaaatcctgctaattgatcatgtagatgagttaaagactcttcaaatcttagtttgtgaaagaaatccaacccagccatgggtcacattacatttgtgtacatgtggagaagagagaggcaggccagttatctttctcttgctttgaaaggcttcacgtttacaccttatagaattagagatacgccatttcaaactaatcccatgacagcagattatcaagaaagcctttcagaattagattttctatgattttaatgtttctttgacagagaatgataatcagtgatatctgatgccttccaaatatacacaagtaacatttccatgattatatgtacaagtaacaaatccaaggtatatgaaatccaaatatatgaaatgactaagatggcaacaatttgaaataattacacgaatctcccatatcacatagaacacatgattcagtctcttgctaatattcttgatttggtatctcttctcagattagattctttaaacttgatttctgatgcagaatcatgtctctatttccctagttgctggtaaagagggaacattttcttacgtgtcttagaatcgtttttgctaattctgctgattcaaataaattcatgcttaacatcaggcttggaaagttatttttagttagcattcatgatattgatagctgattgagaagcacatattttagcataagaaaacagcagcctcatgtttcttttctaaaaatggattaagggatatgtaatgtcagtgatctttaataaaaacagctaacttatgtaaagtaattgttatgtattactatgttttatgtagattatcttacttgataattgagatagccatatctcatggtatttatattccagtttcaccagtgaggaaaaagacactgcgaggttagtaactgtcagagttcagaatcacaccctgaaagttgtactgcagagcctgtgttcttaatttctccaaagtacctctgcccaaattacatgtacctttttaaatctactttcttcatttggtaatacatcataaatgctttctcaattatatggatcagtatcactagtaaatgtattttatgtcatgatatagcagatcataatttatttaatctgtcctctactgtcagatatttctttttttttttctgagacagagtctcgctctgttgcccaggctggagtgcagtggcgcaatcagagcccactgcagcctccgcctcccaggtttgagcgattctcctgcctcagcctcccgagtagctgggactacagctgcctgtccccacgcctggatgatttttttgtatttttagtagagacgaggtttcacaatgttggccaggctgctctcaaacaactgacctcaggtgatccgcccaccttggcctcccaaggtgctgggattacaggcatgagccaccgcacccaacctatttttttgatttttttaaaattattctctgaaggctgggcgtggtggctcacgcctataatcccagcgctttgggagctgaggcgggtggatcacgaggtcaggagatcgagaccatcctggctaacacggtgaaaccccgtctctactaaaaatacaaaaattagccgggcgtggtggtaggcgcatgtagtcgcagctactcaggaggctgaggcaggagaatggcgtgaacccgggaggtggagcttgcagtgagccgagatcatgccactgcactccagcctgggcgacagagcaagactctgtcttttaaaaaaaaaaaaaaaattattctctggagaagtggaataatatcaattgattgcatcaatgacagtgtcctagttgtggtattacactgtagttcaatcatcattggtataaatcaggtaaaaggtaaacaggatctctctcgctgtattgtttcttacaactgcatgtgaatctttatctccattctaaagaaaattcacagagaaaaaattccctgaatattcttgcacaaacaattgtgtatgactatagctgtgtccttcagataaattttgaaaaccagtattttgagtcaaaatcaagacttgttaagtgtctgcagtacgccaaactctgtgatattagcacgaagaatgagagaataactaaaaggacacagctgctacctgtatgttgtctataacccagcaaggaggggaaactgagtagaagcagctcagggcagcctgtgatcacggactgtggggaattccaggtgatgtaccttgagaggtgctaggaagggaacatcattctgacagcacccgctcgggtaggccattcttgcattgctatcaagaaatccctgagactgggtcatttataaagattatattggctcatgcttctgaaggctgaaaaggaagcatggtatcgacatctggcatccacttggcttctagggaggcctcaggagcttttactccactttacttggaaggtgaagtgggagcaggcacgtcacatggcaaaaggaggggtaaggttgggacacagcgctggcgggaggtgcgggggatgccatgtacttttaaatgaccagattttgcaagaactcactcaccatggccaagacatgagggatctgcctccataacccaaacacctcccaccaggccgcacctccagcactggggatgacagttcacctcccaccaggccccacctccagcactggggatgacagttcacctcccaccaggccccacctccagcactggggatgacagttcaactggagatttagacggggcaagtattcaagccataccgcccacggatgtcgatttataaccaaataattctgaattcacaggttccatgtgtaggtaaatacaatttgttttataacttgtatttttctaataatgtttgatgcaaagggaagaccaatagggtaaggcgaattaatgcttgtctgctgggccatcatggcttgaaggacaagttcagaggtaaaattcacactcccctcagacgtaaaaggaagcagcctcaaaacaactgtcggtatgtacagggcatcacttggcattttggccatttttccagtcagtgctccagcacatgtggaaatatgtgtctgtgtgtgcatgtacattggcatccgcaggggtaaccgggacctgatgtgtgagtagaagacgcacttgcgtgggcgtgtgtggggttgatgtgccagctctgtccccataattgtgacaggtgtgcgagtatcttgggggcaatgggacccatgcagggtgaccatccttacagagggaggtcagctacacagtctataaccccagttaatacaatgtagaccccaggaatctctgaaacactctgatcccagtgccctctgacttctgattgtcatagatatggcctgagggcagctgtgccttatgaggtattttctaatgtaggctgcgcacctagaaagaccctagcttctcagtcttatcctcctctttcccctaaaccaacattcttacgaaaaagcacgccttgagaggaggaatcatttacccatcttaaaatcaaggttcaagtgagttacgttttattcattaaatgattagcgtttataagacaggactatttactttccttgcccctaaatattctcactataacaacttatcccggtcatcctttccaaagaggtgttgggggttcatacagggatatccctcaatgtactccccattgaccaagtctctcttctgaatgttattcatgtgcctctttggcaaactgtgtagctttttctgtgtgctctgctcttctaagaatctgatgatatagaaaaatatacctcctggagcttaacattagtgcgtgatattagaatgtggtttgctaaggaaaagattcgtttttaagtggaatcaaacaccacctatctttagtcttttccctaagcctgattttcatatcacagccagaaagtagatcgtttgagtacgtgacaaggttgtcagctttgtgaggcttttaagagtggagtttgagcaaacttctgtgtcatcaaaggcataaatgttttccaagtaatcaataaattgaaattttttctgtttactagattttctttgaagctgacagcctcagagttgtttttttccacttgctttgtgtgcacagtgagaagcaatgtggtttgattttgagtatgagttctggatctaggacagagttggcaaatttttttctgtaaaacgttcagcagtaaagggatttatgggccacatatagttctgtatttttcttctttttatttatttattcggattattgttgttttgtttattaaaatgacatcctttattttttatttttatttgataaataacaaattatgtgcttattatgtacaacattatgttttgatatgtgtgtgcattatggagtgatgaaaccaaagtgaataacatacccttcaccttactagttatcatttttgtgattagaacatttaacatctctcagcaattttcaaatatacattgttattcattatagtcaccaggttataaaatagatacgcagaatttattcctcctctctagcctttgtagccattcatctccctattcccacccctgtcccagcctctggtaaccatcattccactctttgcttctatgagttcagctttttgacacttaaataggtgagataatgcaggtggacctttctatgcctggcttatttcacttaatatgatgtcctctaggttcacccatgttatcacaaatgactggattttcctggtttttaaggcgaatagtatttaattgtgatatatgccacattttctttacccattcctctacagattaacatgtaggttgatttttttttgtttccccctggggtattgtgaataatactgcagcaacttgggagcattccttcctctacaactttttggaagagtttcagaagaatattttgtgaatatttggtagaatacagcaatgaagccatcatcaagtcctgggctgttctttgatcagaaattctgtattatttgttcaatctttttactcattactgatgtgttcagatttttctgtttattcatgattccatcttggtaggttgtgtgtttctaggaattaatcttctaggttatccaacttttttggcatctaattgttcattgtagtctctcacgattctttgtatttctgtggtatgagttgtaatgtctccattttcatttctgattttattgatttttgagtcttcccttttttgtctttgaaagtctcatggtttttcaatgttgtttatcttttcaaaaaatcaactcttagtttcattaatcttcccatattgtttatttagtctccatttatttttattccgacttttattattcctttcattactatgagtgtcatttgttctttttcgagttccttgagaagtaatgtttgtttaaggtctttctcctttcttaatgtaggtgtttattgctataaacttccctcttagaactgcttttcctgcgtttctcaagatttggtatgttgtttccttttgcatttatttcaaaatatttttaaattaaacttttaacttcttccttgacctactggtacttatcatgttgtttaatttccacatatttgtgaatttacctaaattcctcctgttattgatttctagcttaataccactgtggttgaaaagatgcttgataggatttcagttgccttaaatttcttaagacctgttatttggcctaatatgttatctgtcctggagaatctttcatgtgtgctggagaagaatatgtattctgctgctgttgggagggatgctctgtatacatctgataagtccatttggtctaaagtaaaattcaattccagtgtttccttattgattttctgctgaataagttgtcctttgtcgaaagtaggatttgaagtccccttcaattattgtattgcagtctgtttgtcccttcagatcttataatgtgtgctttatatatttacacgatccaatgttgggtacatacatatgtacaattgatacatcttcttcatgaattgatccctttataattctataatgactttctttctcttcttatagtttttgacttaaattctattttgtctgatatacgtacagttgacccttgaacaacatggagctggggcgacaactcaccatgcagtcaaaactccacatttaacttttgactccctaaaaatgtaatagcctactgttgaatggaagccttattgattacataaagtagattaacacaaatatagaatggtatatgtgttatatgcaatactcctacaataaagtaagctagagaaaagaaaatgttattaggaaaatatgccaggcatggtggctcatgcctgtaatagcagctgttatagcagccaaaacggactaagacaactgtattgctgagacacagtgaaaggtcattcaagatcagggggtgacatcttaagtcctagaagtcaaaagtctaaagtgggtctcactgggctaaaaccaacatgttgaagactgtgttgctttttggaggctctaggaggcattctctttcatggcctttcccagcttctagaggctgcccagattagctcatgaccccatcctactttttttttttgatacagagtctcactctgttgcctgggctggagtgcagtggcaccatctcagctcactgcaaactccacctcccagattcaagcgattcttctgcctcagcatcctgagtagctgggattacaggcatgcaccaccacactcggctaatttttgtatttttttagtagatggggtttcaccagttggccaggctggtctcgaactcttgacctcaagtgatccgcccacctcggcctcccaaatgctgggattacaggtgtgagccactgcgtccagccctatcctacacctttaaacccagaaaagacaagtcaagttcttcttgtatcacctcattccccacctgtttctgtcatcacatgtttctcttcttcagaactccctcacctacttttaaggaactttgtaattgcaccaggcccacctagataattcagggtaatctccgtatctgaagggtggctggttagcaatttaagtccatctgcaaccttctttatcttgccttgtaacataacatattcccaggttccagatgtaggatgtggatatattctgccagtaacaggcctgtccatcaaactttcctgaatagctagaatgtacccactcccctataacaatggtctgttttccttactaatctttttttaaatttggggctccctataattatatactttataatgggattaatgaaagcctgtaaccaaaaaaaaaaaaaaaaaaaaattattcccctaagaagcacacaaagaggaaactaaaaattacccttatttatttatttatctatttatttattaagacagagtcttgcttttgttgcccaggctggagtgcaatggtacaagctcggctcactgcaacctctgcctcccgggttcaagagatctgcctcagcctcctgagtagctgggattacaggtgtctgccacacattcagctaatttttgtatttttagtagagatggggtttcgccatgttggccaaggctggtctcgaactcctggcctccagtgatccacctgccttggcctctcaaagtgctggggttacaggtgtaagccactgtccggccgtaattacccatatttataccatctaaagataattactgttaacacttagtatgtatgtttactgtcttcccctccacctctaagcatgtgtgtgttttgtttctggaacattgaatcctattaatcatgtaaatgaggcaaaaactctccaaatcatagtttgtaaaagaaatccagcccaaccacgggtcacattatgtctgtgtgcatgtggagagaagagagataccagtcatgtttccttgctttgaaaaattaatcattgatgaatatgaaaatagtcactggataccttacaaatatggactttggaaatattcccaaggttatatgtgcaagtaacgaatattgactgtaacatttcaaaggtatatgaaatagaatgagatagcactagtttaaaatgttcactttttttttttttttcttttttgagatgaagtcttactctgtcacccaggctggagtgcagtggcgcaatcttggctcactacaacctctgcctcccaggttcaagcgaatctcctgactcagcctcctgagaaactgagattacaatctcaccaccatgcccggctaatttttgtattttcagtagagacagggtttcaccatgttgcccaggttggtcttgaacttctgacctcaagtgatccgctcaccttggcttcccaaagtgctgggattacaggtgtgagccactgcacctagctgataagaatctttaaactagattttttaaggaactatcatgtctctgtctccctagttaaaaggaaatagcagacttgttacttttatgaaaatggattgagatatgttactgattttttagtaataacagctaccttatcttaattgttatatatgactgtgtgtttcatgtggatgatcctgttcaaacagtcatacattgtactatctttcttgtggttttaccagtgaggaaactttaccacactgtgaagttaataactatcagagctcagattaacaccctcaaatcagaccacagagcctgtgttaatttcaccaaaacatgtctgctcaaattatatgtaccattttaacctacccttttcccttgttgattcttcagaagttttcttaattaatgagtcagtattattaggaaatgtactctatgtcattgtataacagaccatggtttaatctgattttcctttatcctccactgcaagattttcatttttaaaaattattctcgactgggtgtggtggctcacgcctgtaattcctgcactttgtgaggccgaggcaggcggatcacctgaggtcgggagttcgagtccagcctgaccaacatagagaaaccccgtctcttctaaaaatacaaaaaaaattagccgggcgtggtagcgcatgcctgtcatcccagctactggggaggctgacgcaggagaaccccttgaacccaggaggcggaggttgcagtgagccgagatcgcaccattgcacttgagcctgggcaacaagagcgaaactccgtctcaaaacaaacaaacaaacaaacaaaaaattattctctggaaattctgggtaacgtcagtggattacatcaatgttaatcttctggttgtggtattatatactacaatcaccagctgaggtaaccaggtgaaaggtacacaagatctctcaattttatttcttgtaactacatatgaatctaaagtctatctaattaaaagagaaaaagattttcagaaaaaaagcattttgtgaacatacttcaacattgtgtacaactatagctacttccttggcataaataccaaaaagtgggattttgagtcaaaatgagactgtggttaagtacctgcaacatcctgtagaccctgtgacgttagtacttggaatgagagcgggactcacggggcataactgctacctgtacattgtttacaatgcagcaagcaagggacaccgaatagcagctccggcagcctgtgctagcggcctgcagagaattccaggtgacgctccagaggggctaggagaggatacccttctgaggacagccatggctcgcccggcatcaccccactcaagaggccagacggggtcccagctggggtgacacagctcctttcccagtcgggaaggggcgtctgcagggaccaggaagggcttagcttggggctgcccgctccggcaccgacctgggacgcgccctgaggcccctgcctgggaccgtcccggactacatttcccagagaccatccaggagtacgccgtgctgcatgctggaacacggggcttggggctctggtttcccccgacggccccgcgtcctcttctagcctcaccctctcccgaggccccagcgttgggggactaccgggtgcgtctgcggctttgggagagtgggaggagggaaagggatgggaggggtgcacgcacacgtgtcagtgtgtccgcgtgtcagcatctgtgcaggcgcacgtgtgtgtcgggctctgttgtgtctgcacatgcgtgtcggcatctgtgcgtgcgcacacgcccgtcagggtctgtgtgcccgcacaggcacgtcaacagctgagcacgctatgtatcgggggtctgtgtacgctcacatacgtgtcggggtctgggtacgtgcacatacgtgtaggggtctgtgtgcacatgcgtgtcgggctctgctgctgtctgcgcgctgcggccgctgggtgcgcgtgcgcatgcgcgctggcctccagggggtggcgggaccgagtgtgtgacgcacttgcgtgggagtacgaggctgacgcggcggccctgtccccgtaactgtgacacgggtgcacgcgagcgtcattgggggcgatgggggccgtgctgggtgcgcgtttgcaccagtgacgcagccgctgcatctccgccagtccgcgcaggtgagattggtgcgcgtggctccgaggggagacgggcacggggcttctgacggtgacgcacttgctggagagtgtggggtgacacagccgggctctccccataactggtgaccgggggtgctccagaggctttgggtcaacgcagcccgtgcctgtgaacctcggcggtgcgtccctgggactctgctccgtgaggtgcgctctgggggttgtgcgggggcagcggtcgggacgggtctccgtggcccacggatgcacctctgcaccgtgtggggtggtggggcccgtagcatggccgtgctgggcgttagtgggtatgaggggcgcagatgtgtctcaggacagagtgagctgtggtgaggctgagctgtgcagacttgtgctgggatgggtgatcgggccttctgggtgacgcaggtgtgtgtgacaacacaacctgtagcttcagcgtctctgtgctgggatggatgatcgggccttctgagtgatgcaggtgtgtgtgacagtgcaacttgtagctccagcgtctctgctgcttcccctgccttcacctcctaaccaagcggtacctgcctgagaacaagggccgcggagggacgtgagcgcctgagcctcgcctggaaattcaccagcaagaaggcagaaacagccatgaggtgacgctttcagagccagaagtgctgtgcatgcaggccacctgagtgacaggggacggtggcctcaggagtagaattcctcctgtagagggacaggtccctgatgtgggagacagggaggggggcagctccacgcgtcatcatctcaatcgccacagcgtgctcttcaggaatctcccagaaactccatctcggggcctcgtatttctcattggttttattaggtatggcaggtgttacccttccggttctgttttccccaggccagcatccttcagaaaaagcatccccgaggaggaagacgaatcgttaaacatctgaaagggtcaggtgagtatccttttttttttatattaaatgatatgtgtttataagacttaagaccaaacattaaaggtagatgaccaagatttgagtcctgtttctgcctcttagctttttgagccttctgaagataggcttgtgaggagggtgaaatgcattaacacgcataaaacccatagacgcgcacccctgagtgggagtgcacagtgagtgctgctgttttgtgctaagtctggatgtctgtacatcaggagcaacgtacatatgaaggtaactgggatgggtgtttgcaggttcacaaaatgaaccacagcctcaaatggcctagaactgttatccttaacctgagggcctgcctttaactccacttacaactttccaagggacattctgtgtatatttactgtatgtgattatcagtgttagtgtatctgtcccccaccaccaccaccctaaggagatactctgtaatttcatggcattaagaaggatggacatgccccaaagacatttagacccattggtctacaatcgaaggctgtgtaccttgaccacaattattgttcaggatggtggaaatggttaagtaattataccacgttcatttcatggaatactctgcagctacaaagaagtaagtttagttataaccgtaagaaagaaaaatgcacctgacataatattaaacactactaatagttattaacaatagtaaatgaaggaaatgcttcagttgcctacaaattccattgaataagatttttgtaaataccttatccaacatgacattttagtatattatttaggattattcatgaatccttcaaaagagaggagcctggccacatttattgagcgcatttttgtaccatactctattgtgttttgcacacactccttaatttattcttaccttagtctgtaacaaagtaccatagaccggtggctgaaaccacaaacatttattgctcacagttctggaggctggaagtctgagaagagggtaccagcatggtcaggttctgatgagggcccttttccaggttggagactgtcaccatcttgctgtgtcctctcacggaggacatgtgtgtgcttggaggctctttggcagagctctaggaggtgtgtgtgcttggaggctctaggagatagtctttttttttctgtaattgagatggaggcttgctctgttgcccatgctggagcgcagtggcacaatcttggctcactgcaacctccacctcccagattcaagtgattctcccgcctcagcctcccgagtagctgggattacaggcacatgtcaccatccgcagctaatttttgtatttttagtggaaacagggtttctccttgttgatcaggctggtctcgaactcctgacctcaggtgattaattagccggcctcagcctcccaaagtgcgggattacaggtgtgagccaccgagcctgccctgtgggaggtattttatgtccttgcttttgctggcttctagacactgccccacatgccttggtttgtgaccccttcttccatcatcaaagctgcaaagacaggccaagtcccttttccatcacgtcactctgaccctacttctttctgttcatctcaccctcttctcattttgaggaccctggtgattacattaggcccgctgaggtaactcaggataatcttccctattttagtgtcagcccattagcaattttagtccgcctgcaaccttaattcccctttgccatgtaaggtaatatcatcataggtgccagcattaccatattgacatgtttgagagaggcaacgagagaacaataatcatatttcttttcttttttttttttttgagacagagtttcgctcttgttgcccaggctggagtgcaatggcgtgatctcagctcgccgtaacctctgcctcctgggttcaagcaattcctgcctcagtctcctgagtagcttggattacaggcatgcgccaccacacccagctaattttgtatttttagtagagacggggtttctcttttgttggtcaggctggtctcgagctcccgacctcaggtgctctgcctgcctcggcctcccaaagtgctgggattacaggcgtgagccaccgtgcccggcctatatttcttcttttatgtgtttttgttttgttttgttttgttttttccttatagacaaggttgtgttctgttgcccatgctggagtgcagtgggttgataatagttcacagcagcctcaatctcctgggctaaagtggtcttcccacctcggcctctcaagtacctgggattacaggcaccagccactgtaccctgctcctatcttgttatatttcttataataggattaatgcaggcctgctgggggcaaagaaagaaacagtccctaaggagcccttaaagaagaatctccaaattacccataattgtaccatccagagataatcactgatgaacattttaaatggccagcactttgggaggccaaagcgggatgatcacttgaggccaggagtctgagaccagcctgggcaacagtgagactccatctctactaaaataaaaaattgaaaaagattagccaggcatggtgatgcatacctatagtttcagctactcagaaggctgctgtgggaggatcacttgggcttaggggttccaggctgcagtgagccattgcactctagcctgggcaacaaagggagacagtgtctcaaaaaaaaaaacaagaaaaaaacatctgaaatggtatttatgtttctaggcctcttctttgcctctaagcatgtgtgtgttttgtttttggagtattgaatcttgctaattcatcataaatgagtcagagactccaaatcttaatttataaaaggaatccaacccagccatgagtcgcattacacctgtgtgtgtgttgggaggggaagggctatgccagtgatctttgccttgttttgaaatatctcacatatttctaccttgtaggattagaaatccatcatctgaatctaacctatggtaacaaattttcaagaaagacagccttttagaattagattatagaatgttaatgttcctttcccaggacatcacaataatcacccatgaacactaatcactgggtgccttgcagatacggactttccatgtgacattagcaagattatttgtacaagtaacaaatatgggctgtataagtaacatttccaagatagaaaaagaattagatgacagtatctcatatgtatctcccttatcccgtggaacacaaaattcagcctcttgctaatgttctcaacttggcatcttctcagattagagtcattaaattagattttcttatgcagaacaatgtctctgtccccctagttgctgatggaaagggaacatttcctcgttatatttcttagaatctcttttgctaatgtattcattttgttaaacaaaatgaatttcattcttaacatcagactctgaatgttatttttggttaatattgattacgcagacagcgggttcaaggaaggcacttttgtttttcttgagacagagtttcgctctggttgcctaggctggagtgcaatggcgcaatcgcggctcaccgcaacctctgcctcccgggttcaagcgattctcctgcttcagcctcttaagtagctgagattacaggcaagtgccaccacgcccagctaattttgtatttttagtagagacagggtttttccatgttggtcaggctggtcttgaactcccgacctcaggtgatccacctgcctcagcctccgaaagtgctgggattacaggcatgagccaccgcgcccagtggcacattttaccattagaaaaaaaaggagggggccaggcatggtggctcacacctgtaatccaaagcactttggcaggctgtgaggcaggaggatcgcttgagcccacaagttcaagaccaacctgggcaacatggtgagaccctgtctctattatgaatttttttatttttttgagacggagtctcgccctgtctcccaggctggagtgtaatggtgcaatcttggttcactgaacctccaccttccagttcaagcaatcctcctgcctcaacctcctgagtagctgggattacaagcgcgcaccaccatgcccagctagttttttgtatctttagtagagacggggtttcaccacgttggccaggctggtctcaaactcctgacctcgtgatccgatccgcctgccttggcctcccaaagtgctgggattacaggcatgagccaccacgcccagccttattatgaattttttaaaaataaaaactataaaaagaaaaactttttttaaagaaaaaaagcaaggagattggccgacatgagttggtcttcaataataacaggtaacttctattacacaaatgtcacatattattgagtgttttacatagattatcatacttgccagttgtaacaatcataccatgtagtacttttattacattttatcagtgacgaaacagacactatgaggctaactgccagggttcagattcacatctctaaagtcagaccacacaacctgtattcttaatttcatcaaaacatctctgcccaaattatatacacctttttaatctaccttcttcacttggtaattcatcataaaaattttctcaagccagacgcggtggctcatggctgtaatcccagcactttgggaggtcgaggtgggcagatcacaaggtcaggagatcgagaccgtcctggccaccatggtgaaatcccatctctactaaaaatacaaaaattggctgggcgtggtggcatgcacctgtagtcccagctactcgggaggctgaggcaggagaatcgcttgaacccgggaggcggaggttgcagtgagttgagatcacgccactgcactccagcttggccagagcaagactccgtctcaaaaaaaaaaaaaaattctcaataagaatcgatattattaggccgggtgtggtggctcatgcctgtaatcccagcactttgggaggccaaggtgggcggatcacgaggtcaggagatggagaccatcctggctaacacggtgaaaccccatctctactaaaaatacaaaaaattagccgggcgaggtagtgggcacctgtagtcccagctactcgggaggctgaggcaggagaatggcgtgaacccaggagacagagcttgcagtgagccgagatcacgccactgcactccagcctgggcgacagagcaagactccgtctcaaaaaaaaaaaaaaagaatcaatattgttagtattccatgccatcatatagcagaccataatttaacccatcctctactgtgagatactgctatttttttcgttgttgaaactgtattctctggaaatcatagataagatcaaggagggaatctgtgtcactatcctggctgtgatactgtactgcagttttgtttttcttttttttgagacggagtctttctctgtcacccaggctggagtgcagtggcacaatctcagctcactgcaacctccaccttctgggttcaagcaattctcctgcctcagcctcctgagtagcggggattacaggctcccaccaccatagccagctaatttttgtatttttagtagagacggggtttcaccatgttggccaggctggtgtcgaatttgtgatctgcctgccttggcctccaaaagtgctgggattacaggcatgagccaccatgcccggcctgtactgtagttttataaggtatcactactggtgtaagtcaggttaagggtgcactggatctctctgtattattatttacaactacatgtgaatctacagttatctcagttttttagaaaaataacttacctagaaaaaaatttttcttgatcgctctttcacatacatttatgtacttctgttttcttgtctttctaactgtttcctcctcctggacccataaattccacatgtggaattttgagtcaaaattagatgtttgttaagggcccgcactatgccacaccctgtgacgttagtacttggaatgagagcgtgactaacggggcataactgctgcctgcacattgtttacaatccagcaagcaaggggcaccgaacagcagctcgggcagcctgtgctgtggcctgcagagaattccaggtgacgccccagagggcctaggagaggatacccttctgagaacagccgtggctcgcccggcatcaccccactcaagaggccagacggggtcccagctggggtgacacagcgccagtcacatccactcatggacactcagtaggccacactcccgatcacccagccacagtcctagatcagtcactgactcacagtctgccacttgtatttccattgtctctgggcttcctctgccttcaccttccaacagtgtggtacctgcctgagagcagcggcccccagtgggacatgagagccaggaccctgtcattaactgaaccaacacaaagggcacagccattgtcatagataagtgttcaagccggacgtgttctccgtaccggctcctgtgtcacagtaacgggaagcctcaggagtgggagtccttgtggagggagaggtgactaacttggtaggtgagtgtcgggagcatcacgtgttctagaatccagtaaatacacgttagtccccaagaactctgaaactcacaaatgccagtgtcctctccattcggattggtttcggctgtggcctggggacaggcgtgccctggagggtatttgctaatgcagcctgtgctccagaaagaccctaggttctcattcttcctttcccctaggctggcatccttcagaaaaagcatcctgagggggaaaaaaaaaaaaaaaaaaaaattattatttaggttggtgcaaaagtaattgcggtttttgccattatgtctaatgtcaattgcttttgcactgacctaatattatatatctgaaagtcggctctccacatgagttaccttttttgttcattaaatgatttgtgtttatatgacttaggactctttactctttatggccccaaatatcctccctaatagcaatttatcccagtaattcctccccaggggatgtggcaagggccaggcaggtatattcctctctgtaccccctggttgaccagccctctcctttgagtatccacaaacccatttgtcaaattgttgacatcctgctgtgtgctctggttttctaagatctgatggtatagaaaaatcccccctaaaaaaaaaaaaaacaactccctcctagaggttcatgttagcgcgctttattttacagtgtgcttgggtaaggaggggattcgtttttaggtggagtcaaacacagatatctttggtcttttccatgggactgatttttagagcacaagaaaagagaaagttagtttgtttagtctgtacctggcaaagttgtcagttttgtgaggcctttaagagcggagtttgagctaatttctgtgtcatcaaaggcagagatgtttttcaatatgcagtaaatcgaaatttgttctattcacttggacttctttgggcggacagcttctgtttttcttcagttccccgtttgtgtgaactgtgagaaaccatatggtttaatgttgagtatgagttctggatctagggcagaggttggcagctgtcttcaatggcaatttgtgtatgtttatggtctacagaggctttgatctgtgtttatactgcagattaaatcaagctgattaacatatccctccctcaactcactgataatcatatttgcaatgagaacatttaaatctagtctcttggcatattcaatattattcattatatttagtcaccatgctagacaataaatctccagaaattattcccactttatctcctttaatcttctcattccccatcaccctcccaggccctgacgaccacctctcttcttctgtgagttggattttttttacactccacatgtaatgacatcatgcaggatttgtctgtctagcttatttcacttagtacaatgtcctccagatttacccatgttgtcacaataacaggatttccttctttataaaggctggatggcattgcattgtgttatctctaccacactttctttattaattcctgatgagtatgtaggttgattccttatcttggctactgtgaataatgctactgcagtgaacacgggagcacaggtatcgccatgacatactaatttcattttctttggatatatacccagagtgggattgctgcgtcatctgatagttttagttttttcaggcatctccacggtgttttccatcatggctaatttacattctaaccaacagtgtataagggtcctcttttcctcacagccttgccaacatgttattttttttgtttgttttttaataaaagccattcttacatgtatgaggtgatatctcattgtggtttaactttttgttgccctgaataatagtagtgatcctgagcaatttttcacagacctatagcaatttgtatgtgttctatcaagaaatggctgttcaagttttctgcccatttattatcagggttgtttggttttttgctgttaagttgtttgagttctatgttttgtcatttttgtttgtttttttttgtttgttttctagacagggtcttgctctgtcatccaggctggagtgcagtggtgcaatgacagttcactgcatcctccacctcctggacccaagcaatcctcctacctcagcctcccaagtagctgggactacaggcacatgccatcatgcccggctaatttttcttttcttttcttttctttttttttgagatggagtctccctctgtcacccaggctggagtgcagtggcgtgatctcggctcactgcaacctccgcctcccgggttcaagcgattctcctgcctcagcctccgagtagctgggattacaggcgcgtgccaccacgcccggctaattttttttttgtatttttagtagagacagggtttcaccctgttagccaggatggtctcgatctcctgacctcatgatccacttgcctcagcctcccaaagtgctgggattacaggtgtgagccacggtgcccggccaatgcccgactaatttttcaattttttgtagatatggggtctcaccatgttgcccaggctgatcttaaactcctgggctcaagcagtcctcccatctcggccttccaaagttctgggattacaggtgtgagccaccatgccaagccctattttggatattaaccccttatcagatatatggtttgaaatagtctctcccaatccataggctaccttttcattttgtttcctttgctgtgtgggagatttttagtttgatgtagtcccatttgcttatttttgcttttgtaggatgatctggtgtgatagctaaaaactcattgccaagggcgatgtgaaggagaattttccctatgtattctcccagtagttttacagtttctggtcttactttttatgtctttaatccattttgacttcatttttctttttttctttttcttctttttttttttgagaccaagtctcactctgtcacccaggctggagtgcagtggcacgatctcggctcactgcaacctccacctcccaggttcaagtgatttctcctccctcagcctcctcagtagctgagattacaggctcctgccaccacacctggctaatttttgtatttttagtagagacggagtttccccatgttggccaggcaggtcttaaactcctgacctcaggtgagccaccgcacctggcctcatttttctctatgaagtaaaataagggtccagttgcattcttctgcatgcaaatatccagttttcccaacagcatttatttaagagatcgtcctttccccattgtgtgatgttggcacctttgtcaaagatcagttgaccatgagtttggatttgtttctgagctctgttcttccattgtgtgtgttttcatgccagtattataaccgtaataggtccgttgccccatgagcacagcatgtcaatacagcaggttgcagcaaagaaagacggtttactgtaaggctgcagaacaaggaggtaggatgaaaatgaaatccgtcctcccagggagtttggagctagggtttttaagggttttaaagtgtggaaatcactgcttaaagagtgcagtgtggagtcatgagacaggaagatgaagaaactattctcatgctgattctgttcctctgtggttgtcttcagactgcttggcatcagctatttcactggaatttgggacctgagaaacatcttgtgcaattcttaaaagcctcatgattctaacgttagaaatcctatgtatgggaacagtggggactctgtctcaaaaaaaaaaaaaaaatttttttttaaaaatcttttcatattgttttccagtctgtattttatttattttttgctctaatctttattatttccttccttcctatctttagactccatttgttcattttctggttccttgaaatgtttgtttgagatcttccttctttcgtgatataagtatttactgctataaacttccggcttagaactgcctctcttgccttctttaagatttgaggatgttgtgtttacatttacgtttgtctcaaaatatttttacagtttcttccctggcccattggttgtttagcatcatgtcgattaatatccacatattttttgatttacctaaatttctcccgttattgatttccagttttatgcccttgtggttggaaaaggtcattcatatgatgtcagtcattgtaaatttcttaagatttgtatcatgtcctaacatgatctatcctggagaatgtttcctgtgtacttgagaagaatgtacatgctgccgctattagagagatggtgcagaatacaactgttaggtccatttggtctaaagcgtaattcaggtccaatgtttacttgttgattttctgtccgaatgatctttcctttgttgaaagtaggatttgaagtcctcttctgtcattgtattaaaatctaaccctcccttgagatttcttaatgtttgctttatgtatttaagagctccaatgctggatgcatacatatctataattaatatatcatcttgactgatggactaattttattatataatgacattctttgcctctctttacagtttttgatttaaagtctattttgtctttttttttttttttttttttttttgagttagagtctcgctgtatcacccatgctggaatgcattggcccgatcttggctcactgcaacttccgcctcccaagttcaagcgattctcctgcctcagcctcccgagtacctgggattacaggctcctgccaccacgccaggctaatttttgtgtttttagtagagatggggttttgccatgttggccatactggtctcaaactcctgacctcaagtgacctgcccaccttggcctcccaaagtgctaagattacaggcgtgagccaccatgcctggccgttaatctttttttttttttttctttttttttgagacagagtcttgctctgtcacccagtctggagtgcaaggtgcaatctcggcccaacctccgcctcccgggttcaagctcttctcctacctcagcctcctgagtagtgtgcaccactatgcctagctaattattgtattttttagtagagatggggtttcaccatgttggtcaggctggtgtcgaactcctgacttcgtgatccacccaccttggcctcccaaagtgctgggattacaggcttgagccactgcgcctggccaatcattttttaaaattaggactcccttaactttcactccttataacgggattaatgcaggccaactgcaaaaaaattcagtcctctaaggagttcataaagaagaatctcaaaattaattacccataattccatctagagataattactgttaatcatatttggtatatatgtttatagtcctccacttcccctctaaacatgtatgtgcttttgtttctggaacattaaatccttctaattgataaagtaaatgaatcaaagactttccaaatggtagtttgtgaaaggcatccagcccagccacgggtcacgttatacctgtgagcatgtggggatgggaggggtgtgccagtgatctttgtcttgttttggaaaacctctcatatatttacaccttataggagtagagacacatcatctgaaactaatcccatggcaacaaattatcaaaaaatatagtgcacccttggaatgagttctgcatctgtggattcagccacagatcaaaaatatccttgggaaaaaaaataggaggtttgcatcctattttacagatgctaacatctgtattgaacatgtacagacttttcttctcattattctaaaccatacagtatgaaaattattagcatagcatataagataatttataaagaatctagaatctaaaatgtacaggaggatgtggataggttatatgcagatactataccactttgtataagagtctgaagcattcgaggattttgatattcaggggggttctggaacaaatctggatactgagggatggctctacagcctttcagaattaaattttctatgattttaatggttctttcaaagaccatgacagtaatcactgacgcctgttgccttacaaatctgcttgtacaagtaacatttccatgattatatgtacaagtaaaaaatacccactatacaaataacaaatccaagatcagtgaaattgagtacgatgacaattaaaatggtttgcataaatgtcctataacacatggaacacatgattcatcctcttgctaatgttcccagtttggcatcttctaagatcatattatttgagcacaatttttgatgcagaatcatctctctgttcccctactcgcttgtgagagggaacatttcctccttatgtgtcttagaatatttttacctaacatgcttaaacaaaacaaatttcattcttaacatcaggctctgaaagttccttttagttagcatttgctatattgacagctggtttgacaagtacatattttagcataagaaaaaaacagcaggccgggtgcagtggcccttgcttgtaatcccagcactttgggaggccaaggaggcagattgcttgagctcaggagatcaaggccagcctgggcagcatagcaagaccccgtctctaccaaaaaaaaaagaaaaaaaattacaaaaactagccagatgtggtggcgtgcacctgtagtcccagctcttgggaggctaaggtgggaggatgacttgagcctaggaggcagaggttgcagtgtggttgagattgcactactgctctccagcctgggtgacaaagcgagaccctgtttcaaaaaaattaaaaacagcagatgagtttcttttttaaaactggattcaggatcagtgtaatgttactgatcttcaatagtaaccacaaacttaaaaaatctttacatattgccgtatgtattagatattctgatatttaatagctgagacagtcataccttatagtattattatcccaattttactagtgaggaaacaagcagttaataactgttagagctcagattcacattctgaaagttatagaaattaagaacatagagcctatgttcttaatttcaccaaaatatctcctcccaaattatacataccctttcaaacctaccttcctctcttagtaattaatgataccgtctttcaatttacatgaatcagtatcactattagtaaatgtattttatgccattatataacagactaatttatttattctgtactctactgtgatattttcctctatcttctgcaagattttcatttttaaaaattactgtcttggctgggtgcagtggctcatgcctgtaatcctggcctaggcaacaagagtgaaactccatctcaaaaaaaaaaaaaaaaaattagtgtcttgaaatttgcataacatcaatggatgatgtcattgtgaatgtcctggcggtgatattatactgtatactataatcaccaattggtgtaaccaggtgaaagatacataggctttctcagtattatgtgtacaactacctaagaatctacggttgtatcaatttaaaagaaaaactttcccacacaagataatctccaaacatcttgggcatacatgtgtgtactactctagctatttccttgggataaattctaaaaagtgggattttgagtcaaaatgagactgtggttaagtagtacctgcaacatcctgtagaccctgtgacattagtacttggaatgagagcgggactaactgggcataactgctgcctgtacattgtttacaatccagcaagcaagggacaccgaatagcacctcgggcagcctgtgctggcggcctgcagagaattccaggtgatgctccagaggggctaggagaggatacccttctgatgacagccatggctcacccggcatcaccccactcagaggccagacgggctcccagctggggtgacacagcccctctcccagccgggaacgggcgtctgcagggagcaagatggactcagtgtggggctgcctgcctggaacgcgccctgaggcccctgcctgggaccggcccagactacgtttcccagaggccccccaggaacttaaggcgctgcatgctgggacacggggcttggggctctggtttccccagacatcgccctcctcaagcctctcaccccttcccgaagcccctgtgtgtttgggcctgagtagggcattcgcttcctaggaggaacccaggggtgcgcgccaagcatgggggtagggggaccgccgagtgcgcctgtggcttcgggagaggccaaagaaggaaggagtgggaagggcgcgcacgcgtgtcagtgtgtgcatgtgtcagcgtctgtgcacgcgcacatgtgtgtcggggtctggtcgcacatgcggatcaaggtctggccacacgcatgcgttgggggtctgtgtgcgcgtacacgtgcatgtcgcggtctgggtgtacatgcgtgtcaggatctgtgtgcacgcacatgcgtgtcgggctctgctgctgcctgcgcgctccggccgctgggtgcgggaggcccctcccgagtccggggtgcgcatgcgcgctggcctccatgggtggcgggaccgactgtgtgacgcacttgcgtgggagtgcgaggctgacgcggcggctctatctcccgtaactgtgacacgggtgcacgcaagcgtcattgggggtgatgggggccgtgctcggtgcgcttctgcaccggtgacgcaaccgctgtgtctccgccagtccgcgcaggtgagattggcgcccatggctccaaggggagacgggcacggagcttctagcggtgacgcacttgctggagagggtgtggggtgacgcagccgggctctccccataactagggctggggtgctcccgaggctttggggcgacggaacccgcacctgtgaacctcggcagtgcgtccccgggactctgttctgtgaggtgcgctctgggggatatgtgggggcggcgatcaggacgggtctccgtggcccacggatgtgcctttgcactgtgtggagtggcggggccggcagcgtggccgtgctgggcgttagtgggtatgaggggcgcagatgtgtctcaggccagtgtgtgctgtggtgaggctgagccatcagtgcaggcttgtgctgggatggttggtcgggccttctgggtgacgcaggtgtgtgtgacagcacaacctgtagctccagcgtctctgtgctgagatgggtgatcgggccttctgggtgacgcaggtgtgtgtgacaacacaacctgtagctccagcttctgtgtgctgggatgggtgatcgggccttctgggtgacgcaggtgtgtgtgacagcacaacctgtagttccagcgtctctgtgctgagatgggtgatcgggccttctgggtgacgcaggtgtgtgtgacaacacaacctgtagctccagcttctctgtgctgggatggatgatcgggccttctgggtgacgcaggtgtgtgtgacagcacaacctgtagctccagcgtctctgctgcttcccctgccttcacctcctaaccaagcggtacctgcctgagaacaagggccgcggaaggacgggagtgcctgagccctgccaggaaattcaccaacaagaaggcagaaacagccatgaggtgacgctttcagagctagaagtgctctccactcagggcgcctgagtgacaggagacggtggcctcaggagtagaattcctcctgtagagggacacgtccctgatgtgggagacagggagaggggcagctccacgcttcatcatctcagttaccacagcgtgctcttcaggaatctcccagaaactccatctcggggcctcgtatttctcattggttttattaggtatggcaggtgttacccttctggttctgttttccccaggccagcatccttcagaaaaagcatccccgaggaggaagacgaatcgttaaacatcttaggtcaggtgagtatcttttttttttttttaattaaatcatatgtgtttatgagacttagtcggcgggcgcagtggctcacgcctgtaatcccagcactttgggaggccgaggtgggcaaatcacaaggtctggagatcgagaccatcctggctaacacggtgaaaccccgtctctactaaaaatacaaaaattagccgggagtggtggtgggcgcctgtagtcccagctactcgggaggctgaggcaggagaatggcgggaacccgggaggcggagcttgcagtgagccgagatcgcaccgcttcactccagcctgggcaacacagcgagactccatctcaaaaaaaaaaaaaaaaaaaaggaaatcctattgaattagacgttttgtaaatatcctatccaagatgacgactgattattcagtgaaggaagagaggagcctggtcacatttattaagcacatattctctgtactaaactgtctcttgtctattttgcacacacctcttaattcttgtcttagttgattcagtctgtgataacaaagtaccatagactgtgtgactaaaagggcaaactttttttttttaattttttttttttttagagacagggtctcactatgttacccaggctggtcttgatctcatgagctcaagctttcctcccaccttggcctcaaaaagtgcttggattacagatgtgagccaccatgttgggccttttttattgtttttgttttgttttgtttttgagacagggtcttactctgtcatcaaggctggagtgcggtggtgtgatcatagctcactgcaacctcagccccctgggctcaagcaatcttcccaccccagcctcccaagtagctggggctactggtgtgtgccaccacatgtggctgtatatttttatttttattttgagacggggtctcgctttgtcatccaggttggagtgcagtggcacaatcttggctcacttcaacctctgctttctgggctcaagcaatcctcccacctcagccttctgagtagctgggactacaggtgtgagccaccacacctggctcttttttttttttttttttttttttttttggtagatacaatgtttcaccatgttgcccaggctggtcgtgaactcctgagctcaagcaatctgctgcctgcctcggcctcccaaagtgctgggattacaggcgtgaggcgccacacccagccaattttttaatattttatagagacagggtcttgccatgttgcccaggctggtatcaaactcctgagctcaagcaatcctcccatttccacctcccaaagtgctggggttacaggcatcacccaccgtgtccggccacagcaagcatttatttcttacagttctgggggctggaagcctgagaccagggtgccagtgcaagcagcttccggtgaggccttcttcaaggttgcaggcgaccaccctcgtgccatggccacacatggtgaaagggagctgagagctctctgggatcgtttttataagacactaatcctattcctgagcactcctccctcatgtcctaatcaccttccaaaggcctcacgtcttaataccatcacattggggaacagaatttcaatataggaatctggggaggaataaaatacttagttttgtcaggtatcttcagaggctatttaggtacagtattgtgctcagggtcagtgtgtacaaaaccaactcatttttcttctctcacaccacaacgataatcaacacagaaaactttgtgacttggccgggtgcggtggcccacacttgtaatcccaggactttaggaggccgaggcggatagatcactttgaggccaggagtttgaaaccagcctggccagcatggcgtaaccctgtctctactaaaaatacaaaaattagctgggtgtggtggcgcatgcctgtaatcccagctactcaggaggctgaggcaggagaatcgcttgaacctgggaggctgtgaacctgtgatgagctgagatcacgccaccacactccagcctaggtgacagagcgagactctgtctcagaaaaaaataagctttgtgactaaatgtgtggggagaagcaagctgtagtggacatcagccggatgtcctgcagttcagttctgacaccatctacctggagatggcatcagattccacaggttgtgagcaagactgtcccactctgccccactagccacaagaccaggcctctgggacatcttgccaaccctctacaggttggggttcttatactctttggcttctattagtgtatttgattgactcagaattcagggaaacacatataccagtttattacaaaggatattttaaaggatactaatgaacagccagatgaagagatatgtaggactagggttggaagagtcccaagcacaggagcttctgttcccgtggaattggggtgcgccaccttttcagagttcttttgtaccttcctagcagccacctcctgttcagctgtccagaagctctcctcaccctgtcttcttaggccttttatggagacttcattggataggtgtgactgaagcatgcacgaatgtgttgaaacgtgattggacaaataagagttgatttaatgctaattgattgagtggggaaactcaaggcccgtctgttcagattcttcttggcctctcagtgcagcattccttcctacaggtacagggcaggaccctctctggagtgagagtcctgctttgggcaggtgaaaggagggcaagagaagatgagagagagattctgcttcccgaggcctgcttctgaggctgaaagtgccctaatattaagattttaccaagggttatggaattatgagccaggaaccatggacaagaacatacagacacactcataccccatatatacacacatataggcacctacatatatacacaccatacacacatatacacacacataccccatatatacacacatatacacacctatacacacctacatatatacacacacatacacaccatacacacatatacacataccatatacacaccatacacacatatacacacacataccccatatatacacacatatacatacctacatatagagacacatatatacacaccatacatatacaaacacaccccgtatacacacatatacacacctacatatagagacacatatatacacaccatacatacacacacaccccatgtacacacacatatacacacctacatatatacacaccatacatatacaaacacaccccatgtacacacctacatatagagacacatatatacacaccatacatacacacaccccatgtacacacacatatacacaactacatatatacataccatacgtatacaaacacaccccatgtacacacctacatatagagacacacacatatacacaccatacacacatatacacacacaccccatatatacacatacacacctacatatatacacacatacacatcgtacacacacaccatatatacatatatacacacatatatacacaccatacacacatgcacacaccatatatatgcatatatacacacctacatatatacacacatatacacacacgccatatatacacacatatacacacctacatatatacacacatatatacacattcatacatgtacatacacaccccatatatacacacatatacacacacatcccatatatacacagctacatatatacacacatataaaaaccatacacacatatacacaccccatatatacacagatatacacacctacatatatacacatatacaccatacgcacatgcacacacatacccatatatacatatatatatacacacacgtatatacatatatacacaccataacacacgtatatacatatatacatatacacatatacataccatacacacacgagcatatacacacacatgccatacacacacatatgtacacatacatacccacaccatacacacatacatacacaccacacacacacatatacaccccgtacacatatatacacacaccatatatacacacacatatacgcacacacaccccatacacatgcatacctcatatatacatatacacacctacatatacataccatacacacacatatatacacacatatacccacaccatacacacacatatatacacacaccatatatatacacacatatatacacatccacaccatatatacacacaccatacacacacatatatacacacaccatatatatacacacatatatacacatccacaccatatatacacacaccatgcacccacatatatacacacaccatatatatgcacatatatatatacacccacaccatatacacacacatacacatatataaacaccatatatatacagacacatatacacacccacagatagacacacatatacacaaacatacacacaattatatcacaaggtctgattgtattactgagacacagtgaaaggatgttccataacaggaaggttatgcctgattcagtgacactactttttcaatattaggccttatatcagtttatttttgctgttttaacaaattactgtagattattggcgtcatacaacacaaatgtattatcttactgtcatagaggtcagaagtctgaagtgggtctcaccgggctaaaaccaggttgttggaggctgtaggagatattctgtgtccttgcttttgctggcttctagacgccgcccacactccttagttcgtgaccccttcttccatcagcaaagcctgaaaagacaagtcctttttccgtcacaccactctgaccctcctcctctaagtttaaggactctggtcattacattgcgcttgcttctataactcaagagaatcttccgtatgttagaggcagccgattagccattttaagtccatctgcagccttaattttcctttgccatacaaggtaacatatttgaaagtactggaattaccatagagacacatttgagaggtgggcaaagtggcaagatcccacctctacaaaaatacaaaagttagccaggcgtggtaatgtgcaactgtggtcccagctactagggacgctgaggtgggaggatcacttgaacccaggagatcgaagctgcagtaagctgggttcacaccactgtactccagtggcgacagagtgagaccctgtcgcaaaatatatgtgcacacatacacacatttgagaggcaggcctatccattcagagtttccttaatgactacagtgtgcctgctcccccataactatgtttgtgtttggcattttcttttaatttgggactatctcagtaaatttcttatattataatgggattaatgcaggcctgctggccaaaaaaaaaaaaaaaaaacaaattagtccctgaggagctcttagagaaaactctctaaattacccgtaattgtgcgatccacaggtcattactgtttctggtcctcgtttttgtaattaatgtttctagtcctcctctttgcccttaagcaggtatgtgttttctttctggagctggaattttgctaattaatcatgtgactactccagagactctttaaatctagttttaaatctaatctgtagcagcaaattatcaagaaagcctttaaaattaaagattctaaggtggaatgattgcttgaggccaggagtttgagaccaacctgagcaacatagtgagacctcatctctccaaaaatttaaaaaattagccaggcatggtggtgtgtgcctatggtcctagctacttaggaagctgaagtgggaggatcccttcagcccaagaggttaaggctgcaatgagccgtgatcccaccactgccctccagcctgggtgaaagagtgagaccatctcaaaaaaaaactagaaggccgggtgcaatggcttgtgcctgtcatcccagctctttgggaggctgaggcaggtagatcacctgaggtcaggagttcgaaaccagcctggccaacatggtgaaacgccgtctctacaaaaaatacaaaaattaggcaggcgtggtggcgcgcgcctgtaatcccaggtacttgggaggctgaggcaggagaattgcttgaacctgggaggtggaggttgcagtgagccgagattgtgccacagcattccagcctggatggtagaacaagactctgtctcaaaaaataagataaaatagctagagattctagaattgtaatgtttctttcccagaacatgacagtaatcactgataaattctaagtaatcatcaggtgccttacaaatatggactttctgggtaacattagcaaggttatagatacaagtaacaaagactgtgtaagtaacatttgcaagataaaataatgaggtgataagatggcaatagttaaaaatgttcacatgtatcttccatttcacatagaacacaagattcacgccgggtgcagtggcttatgcctgtcaccccagcactttgggaggccaaagcgggtggatcacctgaggtcaggagttcgagaccagcctggctaacatggtgaaaccccatctctactaaaaatacaaaaactagccaagcatggtggcaagcgcctataatcccagcttcttgggaggctgaggtaggagaatcacttgaacctgggaggttgaggttgcagtgagccaagatcgctccactgtactccagcctgggcaacaagagcaaaatcccatctcaaaaagaaaaaaaaaaactccgggcactgtggctcatgcctgtaatcccaacactttggaaggccgaggtgggcagatcacgaagtcaggagttcgagaccatactggccaacatggtgaaaccccatctctactaaaaatacaaaaaatagccgggcatggtgacgcatgcctgtaatcccagctactcaggagactgaggcaggagaatcgcttgaactcgggaggcagaggttgcagtgagtcgagattgcgccactgcactccagcctcagcaacagagtgagactgtctcttaaaaaaacaaaaaacaaaaaaccagattcaccctcttgctaatgtttgcaagttggcatcttctcgaaataggttctgtaagctggctggattccacacccccccaccccccgtccccgagaaggagtcttgctatgtcatccaggctggagtgcaagggcgtgatctcagctcactgcaatctccgcctcccgggttcaagcgattctcctgcctcagcctcccaagaagctggtattacaggcttgtaccaccacactcagctaatttttgtatttttagtagagatggggtttcaccatgttgggcaggctggtcttgaactcctgacctcgtaatccacccacctcagcctcccaaagtactgggattacaggtgtgagccaccgcacccagccaagctggattttttaatgcagaatcatgtctcttttctctacttactggtggagaggcaacatttccctaaatgtgtcttagaatctttattgctagttttgctaatgaacagaatttcattcttcacacattaagctctgaaaattgtttttagtttgcattcattatattggcaactggcttgagaaatatattttaatgtaagtaaaaaaaaaagcagacttgattattttataaaatttgagatgtgtaatgttgatcttcaataataacagctaatttacattaaataattgttgtgtattactgcatgttgtagatagattatcttagttaatagttcatgcagtcataccttgtggtatttttattccagctttaccagtgaggaaaccgacactgtgaggttagtaatcatcagagctcaggtttgcatcctgaaagaccacagagctgccaggtgcggtggcaaaacccatctctactaaaaatacaaaaattagccgggcgtgggcgcgcacctgtagtcccagctactcaggaggctgaggcaggagaatggcttgaacccgggagggagaggttgcagtgacccgagatcacaccgttgcactccagcctggcgacagagcgagacttcatctcaaaaaaaaaaaaaaaaaaaaaaaagagcacagagcctgcattctttttttttttttttttttttgagacagagtctcactctgttgcccaggctgcaatacagtggctattcacaggtaccatcccactactgatcagcacaggagttttgactgcctctatttctgacctgggccagttcatccaagcctgtgtccttaatttcagcaaaacatctctgtccagattatacgtacctttttattttattttattttattttttttgagatggagtcttcccctgttgccaagactggagtacagtagtgcgatctcggctcactgcagcctctgcctcccgggtcccagcgattctcccgcctcagcctcccaagaagctgggattacaggcatgtgccaccatgcccggctaatttttgtgtttttagtagagacagggttttgctatgttggccaggctggttttggaactcctgacctcaagtgatccacccgccttggcctcccaaagcgctgggattacaggcatgagccactgtgcccggactatacataattttttaaatctaccttcttcccttggtaattcatcagaaattttttctcaattaatctgcatcaatatcattagtaaatgtattccatatcattatataacattatttatatatgtgttctctactatgagatatttcagttgttttcatttttaaacattatctgctggaaaatctggataagatccatgggttgttattgtcctggttgtgatattttactgttattttgcaaggtgtcacagttggcataaatcaggtcaagggtacaaaagaccactgtctagtatttcttataactacatgtgtatctacatttatctcagtttaaaagacaatctttcctagaaaaaactgattttttgaacattcttaggcatgcattcatatactactatagctatttccttgtcataaattccagaatgtggaatttttagtcaaaattagacatttgttcagtgcctgcaatatgccagatgctgtggctattcgtacttggaatgagagtctgattcagtggactcagctgctgcctgtacagtgtttataatccagcaagggaaactaaatagaagaagctcaaggcagcctgtggtcaaggccggtggagaattccaggtcacacactcagagaggtgccaggaaggggacatcattctgtggacagccactgataattcatgaccaggtgattctgaatatactgactctttgttgggataaatggaatttattttctaggctttataccttaggtaatttttttcctttttaaattttttgtagagatggggtcttgctatgttgcccaggctggtctcagactcctggcttcaagcagtcctcccactgtggccccacaaagcgcagtgttggcattacaagtgtgaaccactatgtctggccttttttgtcctttatccttttttatttttatttttttttctttttgagacagagtctcagtctgtcacccaggctggagtgcagtggcacgatctgggctcactggaaactccacctcctgggttcaagcaattcttgtgcctcagcttcccgagtagctgggattacaggcacgcaccaccacacctagctaatatttgtatttttctagtagggacggggtttcaccatgttggccaggctggtctcaaactcctgacctcaggtgatccgcccgcctcagcctcccaaagtgctgggattacaggagtgagccaccatggctaggagtagactttttaagaaaaaaaaagaaaccttctttgtctttggagagtctaattgcctctgactacatttcaaatcagtacacatttatatttgataagggaatgcatgccttttgttgcaacaaataggtgcactgaaatgaagacactcaagatcacggggtgtgtcaggagctgtcaggaccaccaccaggttccttgtttctctagatggactcaacaggactcaccatctagacctactcgtgaccgatttattccagtgaagggatacaaagcaaaaccagctgagggagaggttgcataggacaggttagcagggcaccaggctccctcttcctcagtcctctcccaggggcatcacaccggatgtgcctggctcatccagcatcacattgtgacaacacctgttccatgttatcgaccagggaagctcaccagagtctgctggtgcaaggtttggtttggtttggtttggttttgggtcagagttttgctctttcgtccaggctggagtgaagtggcatgatctcggctcgctgcaacctctgccccctgggtgcaagtgattctcctgcctcagcctcccaagtagctgggtttacaggcacccgccaccaggcccagctaatttttgtatggtagtgcaaggttttgatcagggttcatgcacacactgcctcgcacaatctgaatcttctggactcccggaggaaaccaagggttccgtgtaaaccacattgtttatactgattattccagcgaagggatacaaagcaaaatcagaagagggagaggttgcataggacaggttagcagggaaccaggctcagtttaggcacagcgagccactcttacacgtgaaagaagagtgagaacactcgggtgtggttttcagacgccatgggccagtgttgcgagcagcctaagcatggcagtttccagttcagtgtgttaactgttttgcataaggggtcgtagaacttcccggattttttctttctgtttctctgtttttatatctctattttatttatttttctactgatatcttagggttggtttgtcagcgtgtatggttctgcattccctccttccctctctcctcctctccctctctctccatatatatacatgtgtatgtgtatgtgtatatatagacagatgcgtgtgtgtgtgtatttttatatatggaattttacaaatgttattgtgtcattctgttttggtaacctaactttactgagagtatgtctgaaatatctctcatgtctttaaatatctttctaacttaacattcagtaatcatttactattttactttgatattctgtgtgtaattatgctgtcagcttttctggactcaaaagtgctctcagatgtcacctctggtatacaaaaaaaacagttctgtatattacctgagcagtttcttgtccacctgccatgttgtgagtaacatcacccaatctagaggccagaagaggcccaagtttggataatacagcccctgttcaccctggaagcttgtctggaggggccagggtaggctcagaatgagactgaatactctgagcacccactgtctgatcctagatcacaatccccccatccagagttagctaatctatgaggctcatgggtatggtctgcatagaagaccaccctcacttctgacaccactgcaagcttggtggggattcctcaaaccgccctcaggttcaacagttcactagagccaggcatggtgactcatgcctataatcccagcaccttgggaagctaaggtgggaagctcacttgaggccaggagttcaagaccagcctgggaaatatagtgagacgcaatctctacaaaaaaaaaaattagccaagtgcagtggtgcaacctgtaatcccacctactcgggaggctgaggtgggaggattgctcgagcccaggaagtcaaggctgcagtgagctgagattgtaccactgcactccagcctggatgagagtgagaccctgtcttaaaaaaaaaaaacaaaaaactattcactaaaaggacccacagaattcactgagagatgttatgctcatggttacagtttattacaaggaaaggatacagattgtcatcacccaaggaaagaagtacgtggccaggtgtggtggctcatgcctgtaatcccaacgctttgggaggacaaggagggcagatcacgaggtcgggagtttgagaccagcctggccaacatggtgaaaccccatctctactaaaaatacaaaaattagctggacatggtggcatgtgcctatagtcccagctactcaggaggctgaggagaatcgcttgaacccgggaggcagaggttgtggtaggccgagatcgtgccactgcactccagcctgggcaacagagtgagactccgttcaaaaaaaaaaaaaaaaagtacgtaagttgaagtccaggagggttccagacacagagcttctggtgtcttctccctgtggagtcaggactcattactctgctgtctttgatgtgtgacaacaggcaccaactatcgccaactagagaagctcaccagagctctgatgttggaagtttttattggggcctcagcatgtagacatgattgactggttggtggattaactgtctacatggttaatcttagtgtccaggtcagctgatactgcgtgaccaaaagctcctaccccgaatcccttgattagtatttctggcatagcaagcccccatcagaaacaaagacattcctcttagaggtaatatagattacctttcagcaccagagggcaaaggccagactactttttaggcaagtacacattctttactacatcccacccatccgtccccgacagggagctggccagaaatggagccctcctgttaaattgtctgggcctgtctttgaggcgcaaaaaaaaaaaaaagtaaagcctcctctgctgtgtgcagctaggtttcctgaggtttcattgagagcttggtttaggtttgatccatgatactcttttttttttttttttttttttttgagacagaatcttgctctgtcaccagaggctggagtgcagtgacgcaatctcagctcactgcaacctccgcctcccgggttcaagcgattcccctgcctcaacctcccaagtagctgggactacaggcacgtgccaccacatccggctaattttttgtatttttagtagaggcagggtttcaccgtgttagccaagatggtctcgatctcctaaccttgtgatccacccacctcggcctcccaaagtgctgggattacaggcgtgagccaccgcacctggcctgatccatgatactcttcacctttcccagatatgtcacggttatgtgtttgtgttgggaagccaagacagaggagccaaaaggtcatattacatcactatggggaccccagatgcacctcgttttaatctctttttttccacccctagctctagcctctcggaatttgtcttcttcagtggaaaccccgagaagactgatcagttcttcagttctaaaacaatggcccaggtaagtgtatatttctctttccttcttgagctatgatatttgcgttctgtgcatctgcttgtgaattatctgaagccttttatctagtcaagctctttataattacctgtttcccagctctttctattccagtgaatgataatgccacgtagctccgtgtctgcctttttgggaaatcactgagcaggtgattaagtatctcctgtttgctcccttttttggcaagggtaattttggagcagtgaagtagcaaagtcctttgagggaaatatttaagtcaagtctgtggtttgatgagttagatatgttggtcccatctgaccacatgagaaacagatcctccactgatcatgttttctgcgtagataagagggaatgctcatattcgccggtctgtcttagtatgtgctcagatcccaagctttatgggacttttggaaagggatggggctgtgattaggacctttgaacagaggtcatgttcctgccgggaaactggaggataaattttattattgaatggatctctcagaccacaagatgattctaagtcatctgacatccttatcctctaaatcagaaacagggggccgggtgtggtggctcacacctgtaatcccagcactttgggaggcccaggtgggtggatcacttgtggtcaggagttcaaaaccaacctgaccaacatggtaaaacctcatctgtactaaaaataccaaaattagcaggctatggtggcatgtgtccataatcccagctacttggtaggctgaggcaggagaattgcttgaacccaggagatggaggttgcagtgagccaagatcatgccactgcactccagcctgggcaacagagcaagactctgtctcaaaaaaaaaaaaaaaaaaaaatcaggaacgggggaaaggcagggttatggatggtaataaatatgaagatcttccagtatggaagtaggagatgatcacataccccagaatcggagaaagccttaggtgttttgggcaacctaagtgaataactgtaataaacagtctgacttacctgtgtgggaattttttaaatgcttaaaaggaagactgcttaaaatgtagtttggcatgatgaactggaggcttgaaaacattcaaacatgcaaaccgtattttctttttttttttcttgggacggagtttcactcttgttgcccaggctggagtgcagtggtgccatcttggctcacctcaacctctgcctcgcgggttcaagtaattctcctgcctcagcctcctgagtagctgggattacagggatgcgccgccacacccagctaattttgtattttaagtagagacgaggtttctgcatgttggtcaacctggtctcgaacccccaacctcaggtgatccgcctgcctcagcctcccaaagtgctgggattacaggcatgagccaccacacccagcaaaccctatcttcttttcttttcttttcttttctttttttttttgagacagagtctcgctctgtcgcccaggctggagtgcagtgccacaatctccgctcactgcaagctctgaccaccccgggttcatgccattctcctgcctcagcctcccgagtagctgggactacaggcgcccaccatcacgcccggctaatttttttgtatttttagtagagatggggtttcaccatgtttgccaggatggtctcgatctcctgacctcgtgatccgcctgccttgttctcgtgatccgcctgccttggcctcccaaagtgttgggattacaggcgtgagccccccgcccagccccagcaaaccctattttctaaaataaaagttcttaaacagaaatcttgatttttcttccccccttaaaagaaaaaatgctgtaggaatccacacttgttgagaacttataaggcaggcacgtagcagacactgcttgtaagcaagaagaaaacttggattgttttatccacttcctggcaggtttgactaactgaggattctgcacagtaaagtcattttctctgcagcggtagagctcttcagtgacatgcaggcattctgcttccgtcacagttacagtgatgtccttaccgccccttgccgatgtcacgggtgttcagtctgctcacggtgttcaccctacccagagggtggcctcctgtctccttcatctggaagctgtttcctttcatttcatcatgcacgtgtgggtttctgtttcagggtttggtgacgttcgccgacgtagccatagacttttctcaggaggagtgggcctgtctgaactctgctcagagggacctgtactgggacgtgatgctggagaactacagtaacttggtctcactgggtgagttgcacgcctcagataacttagactgcctcctggaatatccgctctcccctgtgaatttcaggaccgcctttcaagaaactagttgaatttcttcttcctgtccccaaggaatgtattgagccttattgatgtggccgtgagcaccacaaccttcccctcccatccatcggttaccttcccacctttgtcgactcccccgtaatcatctcacttccttaatgtccgtggaatgagtgggaattctgggatatttatttcatgaccatcttcaaaggagccagtttgtcctgtgagagtatgtttatacccaaattgctattggtggtcggtgttactctagggacccacgtctagggaaaacatgtggacacagtgccctgaattgttctagtaaaccagcctatgtgtttgaagtacagtagatcagacaaacagaatttgtgtaaaaccaaagtgggcgtatttcatttcttacataccatacctgaagtgaggttgaaagttacaatccccgaactgtgagttaaacattgaatgacaatatcttgcaaacatccctggaaacttatttttcttctagcaaaaataacaacaatgatattaatggctaagctgtctgtggtgaccctgcctgtaatcccagctactcgggagactgaggcaggaggatcacttgagcccaggagttgaaggctatagttagctatgatcataccactgtactccaggctgggtaacagatcaagaccccatcgctaaaacaataaacaaataggaatatatatattttatatatatacacacacatatatattatatatacacacacatatatattatatatacacatatatattatatatacacatatatattatatatacacatatatacatatacaatatatacatatatagtatatattatatatataaactgcttactgtgtgccatgcactgtgctaagcactgtgtgtgtaagtacattgcatttcgttctcacaggcagatgagacaggcacaatcattgtctattttggagatgaggatactgaaacacagtgatgcagtcagacggagggagcaggagctagaatcagatttaacagttttggtccccagattccttgctgccagccaccatgttccacttgcctccaggcataatgcctacagaaatttaaaatatgaccttttctcggccaggcgcagtggctcacgcctgtaatcccagcactttgggaggctgaggtgggcggatcactggaggtcaggagttagagaccagcctggccaacatggtgaaaccctgtctctactaaaaatataaaaattagccgggcatggtggcgcacgcctgtgatctcagctactccggaggctggtgcaggagaatcatttgaacctgggaagcagaggttgcagtgagccaagatcacgctactgtgctgcagcctgggcaacaaagcgagactctgtctcaaaaataataaaaaataaggccgggtgcggtggctcactcctgtgatcacaagactggcaggccaaggcagacggatcacgaagataggagttcgagaccagcttggccaacagagtgaaaccccatctctcctgaaaatacaaaaatttgccgggtgtggtggcgcatgcctgtaattccagctacttgggaggctgaggcaggagaatcacttgaacccgggaggtagaggtatagcatttctttttttttttaagttgagatttttttctttttttcactctgttactcaggctggagtgcagtggcgcgatcacagctcacagcagcctcaacctcctgggctcaagcaatcttcctgcctcatctccctgagtagcagggaccacaggtgcacaccacgacacccggctaattgttgtgttttttcttagagatgggatttcgccatgttgtccaagctgatcttgaactcctgggctaaaggaatccacccacctcagccttccaaagaggctggattacaggcgtgagccactgcacctggctcaatagcattttgacttctggttgttataaatttgattaatactcaatcaaaaaaaatttaaggccaggcatggtggttcacgcctataatcccagcactttgggagtccaaggcgggcagatcacctgaagtcaggacttcaagaccagcctggccaacatggtgaaaacccgtctctactaaaaacacaaaaattagccggtgtgctggtgtgcgcctgtaatcccagctacccaggagactgagtgaggcaggagaattgctgggacctgggaggcagaggctgcagtgagtcaagatcatgccactgcactccagcctgggcaacagagcaagactccctctcaaaaaataaaaataatttttaaagaatttttgaagttttgagcttgaaatttttcctcaagttctatgtcctctagcatttcgtttttttaaaggagggcatataatttctaagccagaggtactgtcttatagaattaagggaaagagccttgatggttgtgagggaagagacaagacaacaatacggaggaaagtgggagccagtcagccacccgtacaaagagcatccccacagggcagggaacaggcacaccctgaggtgttggagagctttctccaagagctcaggcccaaagcctctaggaaagaaagatcttaccacgaacttgatcttcaccccatttccctgtcaccttgtttttcctgtcatatttaaccccattttatgtgctgctggtgctgctggtctgtgggccacgcctttagtagcgggtagaggtgacagggtcctctgccctttatcattcctgaaagtgggttagcctcgctttaagtgcccgttttctttttctcatatctaggtgttggcagtactgcttcccgggtgttgttaatgtgtcaccaccatgaagcacctggtgtctggttgtagctcctctttgccattggcagtcattggcactgcttacattcatcacactgggggctcaaatggtgcgcgcctatcactgccccttcatttatcagctgttataatttaaagagaaactttgtttcatctgctaattgctcatgcagtggcactgttcatattggataagaaggataaaaactttgttctttttctttgtcagtttttatgttgtatttttttcttttcttttttttttttttttttgaggcagggtcttactctgattcccaggctggagtgcagtagtgcagtctgggctcactgcagccttgacttccgggctcaagccatcctcccacctcagcctcccaagtagctgggactataggtgtacaccaccacacctggctaatttttgtattttttttgtagagacagggttttgctatgtttcccaggctggttttgaactcctgagctcaagtaatccacccacctcggtctcccaaagtgctgggattacaggcgtgagccactgcacctagccaattgccagtttttataataaaggtctggtttcctagcgtgttccagagctggccatttaacattttgtagtatcattatgaacttatagatttaaacgtttgctgtttctcagtcctttgcagttagcctccttattgatgctcaagttctaaacttttccttattgttcttctaaactttttcacattttttattaaatttagtctcgtaaattatcttttttgttgcttttgaatgttgtattcttttacccagttgcttttttttttttttttttttttgagacggagtcttattcagtcggctcactgcaacctccacctcccgggttcaagcgattctcctgcctcagcctcccaagtagctgggattataggctcacaccaccatgcctggctaatttttgcgtttttagtacagacagggtttgtttgtttttgttttttgttttttgtttttttgatatggagtctagctctgtcacccaggctggagtgcagtggcacaatctcggctcaccgcaacttctgcctcccgggttcaagcgattctcctgcctcagcctccggagtagctgggattacaggcacccaccaccatgcccagctaatgtttgtatttttagtagagacaggatttcaccgtgttggccaggctggtctcgaactcctgacttcatgatctgcccacctcggcctcccaaagtgctgggattacaagcgtgagccaccgtgcccagtctgtttttttgtttttgttttgagacagagtttcatgcttgttgcccaggctacagtgcaatggcatgatctcggctcactgcaacctctgcttcccaggttcaagcaatttccctgcctcagcctcccgagtagctgggattacagtcatgcgccaccatgtccggctaattttgtatttttagtagagacaaggtttctccatgttggtcaagctggtctcggactcccgacctcaggtgatctgcctgccttggcctcccaaagtgctgggattacaggcgtgatgagccaccactcccggccctttaccagttacttttaataatactactgacatatacgtgtatcagtttcagaatgctttacacacagccatccaactgcatattgttttgttacagtacttctatatttggttttccaagtatatcatcacatcatctacaaatacttgttttcatcttcaaaataggaaataataggactaattgtcgggacctttttcatgtctgactttaaaatagatgtctccaatgaattctcagttagtattgtaccagaagtagaatctacattttaacaagagccctgggtgattcacatttattctactggataatttttatttctattagacgagtttttggtttgtggttaggttcgtttgtacttgtgtccctctaaaggaaagaaaatatgttcttttttcccagatttggagtcagcatatgaaaataagagtttacctacagaaaaaaacattcatgaaataagggcttccaaaaggaattcagatagaagaagtaaatcccttggccgtaactggatatgtgaaggtacgcttgaaagaccacagcgctccagagggaggtatgtcaatcagatgatcatcaattatgtcaaaagacctgctactagagaaggcacccctcctagaacacatcagagacatcataaggagaattcctttgaatgtaaggactgtgggaaggcctttagtcgtggctatcaacttagtcaacatcagaaaatccatactggtgagaaaccttatgaatgtaaagaatgtaagaaggccttccgttggggcaatcagcttactcaacatcaaaaaattcatactggggagaagccctacgaatgtaaagactgtgggaaggcttttcgatggggctcaagcctcgttattcataagaggattcatactggtgaaaaaccctatgaatgtaaagactgtggaaaggcctttcggcgtggtgatgagctcactcagcaccagagattccacactggggagaaagactacgaatgcaaagactgtgggaagacctttagccgtgtgtataaacttattcagcacaagagaattcatagtggggagaagccttacgagtgtaaagactgtgggaaggcttttatttgtggttcaagcctcattcagcataaaagaattcacacaggtgagaaaccctatgaatgtcaagaatgtgggaaggcctttactcgagtcaattaccttactcagcatcagaagatccacaccggtgagaagcctcacgaatgtaaggagtgtgggaaggcctttcgctggggttcgagcctcgttaagcacgagaggatacatacgggcgagaagccgtacaagtgcacagaatgtgggaaggccttcaattgtggctatcacctcactcagcacgagagaatccacacaggcgaaaccccgtataaatgtaaggagtgtgggaaggctttcatttatggatcgagcctcgtgaaacatgagagaattcataccggggtgaaaccctatgggtgtacagaatgtgggaagagctttagtcacggccatcagcttacacaacatcagaaaacgcacagtggggcgaaatcctacgaatgtaaggagtgcgggaaggcatgtaaccacctaaaccatctccgagaacatcagaggatccacaacagttgaagagccttttgaacgcagtagcccgctcgtatctatggtttcgctttccacagtttgttacctgcagtcaactgcagttcaaaaatattaaatggaaaattccagaaataaagaattttaagtctcaaatggtgtgcccttctgagtagcgtgatgaaatctctcgctgtccggctccagccggccggggatgtgagtcatcccttggtccagcacatccacgctgtatacgccacccaccctgctagtgacttagtagccgtcttggtgatcagatcaactatcccagcatcacagtgcctgtgcccaagcagtcctcactttgcttaacagtggccccagagagcaggagtagtgatgctggtgattcggatatgccaaagagaagccacaaagtgcttccttttaaatgaaaaggtgaaagttctcaacttaaaaaagaaaagaaaaaaatcatatactgaggttgctaagatctacatgacaataagatattttgggagagagatacgttcacataattttattacatatattgttacaattgttctattttgttagttactgttggtaatctcttactgtgcctaatttataaattaaactttagatatgtatgtacaggaaaaaatgtagtatatagtatcgtatatatgtacaggaaaaaaacgtactatctgtggtttcaggtgtccactgcgggtcttcaaacgtacccccctcaggtgagaggggactgctgtacaaagaatataggaaggcctctagactacatccattccttcctcaacaggaggaaaattcctggtacagtttaacgtaaggcttcactgatcactgttgtttttgtttttgtttttgtttttttgagacagagtctcactcttgcccaggctggagtgcagtggcacggtcttggctcactgcaacctccacctcccaggttccagcaattctcctgcctcagcctccccagtagctgggattacagacatgcaccaccacacctggctaatttttgtatttttagtagagacagttttcaccatgttgtccaggctggtctcaactcctgacctcaggtgatccacccaccttgccctcccaaagtgctaggattacaggcgtgagccactgcacctagcccactgatcactcttctgcttacagaatatcagaagtcattctagaggcaaatttgaagagtggaaaaatcactttttctgaatgatcttgtttttggtgtagatgtttttattgtgtgggttagtttaatgaatacataaagactaccagtaccattctgtctttactccgtggcatctgtggaataaccctgctaatgtaacacgtgagaaagcctttggtcatgccacccactctaccagttgtccccaccatcccccgccctcctccctgtgagacactgggccaaaggctcactacccctgtgcgttgtccagcacacagacactatgtgcattatttgtacataaggataatcacatctacctgagactgctatcatggaaattaaatgtttggtacatgtaaagtctttgaaagtgtaactggaatattgtgtaattttaataaataataactattgttgtttttatgatcattactaccatttgtgttgccattagtgaatttttacaagaaaactccctgtgggtgcaatgagtctggaaaagaccattgagtcttctagaagaaaacattaagagattattggcacagccgtgggttacgcaatgatttcttagtacacaaaacacagcaaacataaaaagttgttacacttcatcaaaagtacaaagttctgttcatcaaatgatgctgttaagatagggaaaagacaagaaacaggactggaagaagatgtttgctctaaggtacacctgacaaaggaactctcatagaaaatataaagaatccctcaagttgaaaaaaaaatcaatttaaaggggagaaaacttcagcacgtctcaacagaagaccaccaaatggccaataagtaagtgaaaatgtattcaatgtcattgctcctcaaggaactgtagagtaaaaccacaatgtgctgtcactctagacagtcaccaggatgattaaatttaaatcacaataacaaggctgatttcagatgtctcaccacaaagaaggaggataagggagcgaggtgatggatatgttaattagcttgatttaatccttccacattgtatacatgtatcagaacatcacattgtactccatcaatataatacaattattatttgtcaatcaaatattaataaaatcaaagatgagcaggtctctttgttggatattcaaacacgacctattcaagaaggaaccccgccagcagactggacctctgctaaaccctagcggtgcccacagcagggacagcgcgggagggaggtgagcggactggtcctggggacggggtcagggcccagagtagagttgttacaggaaaggggtgccaatccagaccccaggagagagttcttggatctcacacaagaaagaattcaggacaagtcctcagtgcaaagcaaaagcaactttattaagaaagtaaagtggtgggaccaggtgcggtggctcacgcctgtaatcccagcactttgggaggccgaggtgggtagatcacctgaggtcgggagttcaagaccagcctggccaacatggcaagaccccatctctactataaatacaaaattagccaggtgtgtgggcacacatctgcagtccagctactcgagaggctgagccaggagaatcacttgaacccgggaggcagaggttgcagtgagctgagatcacaccactgcactccagcctgggcgacagagggaggctccatctcaaaaacagaaaaagtggcgaaaggacagctactccacagacagtgttggacgctcctgacgttaggaggaacgcatccaccctaggtccaatgctcacatatatggggagacgtgctctgctacaagggtttgtgatgaaggattcattctcttcattattttgcaagaattgatattatctttaaagcaaaactaggaatgcctttgttctccagatatcaggatatctggacactcccaagtgtgggtctgtttagtaactgttaataatttgttcccttaaccgtaaacatctggaggctcggaattgcctacatttctcagaatgcagcccagcaagtctcagcctcattttcctagcccgcactcaaaatggagtcgctctggttcaaacacctctgacagagtcctgggggaggtgcggacacagactcaggggagagacctgaactatcttaagatggtcctaggctgagggtaggattaccttagggaaaggaccagagcccatagtaggaatcggagaatatggattggggaggactctagaccccatgggagtgagtttgacggggcagaggagtggctaatgggcatgggagggcctggctagagctcagggatgaattctgggagagaagggatagaggcctggagagaggccttggggctgggagaggactggagtgctcctgagagcagctgcggagatggagggcggacgctacatcctgcaggagagccttaggcacgggggatggtggtgtggttagagctcaggggtgtcctataaaggttggcaaaggatccagaatatagggttgaagtcctgcttgtttgatttacctcaagggtagggttacgtttcaatcaaagctgcttagttctcggattacaaatacctcagcattaggttaaggattcagattctccaggggtggtggggaagtgagggagcatgtttggggaaggggttccagacccaggtttcagagctgggtatctttctggtctaggcttcagtacccttaggaatcaacctcataggcggcaccgtcctgcttagtgcccctttcccctgtggaccctacgccagcctcagcagaaggggcccagggtcccttccttgccaccaagagcaacacgcatggtggggccactgctcttcccagcattcccgcataaacagaggaggagctgggtggggtaaggagaagggcaggggaaggagtgtgaagaggagaagcaggtggaagacagtgagaggaggctggaggaatgtgggagtaggggtagggagaatactgagaaacgaggaggctgtgcagaaaggcagcactggcctggccttacaggacacagccaaggcacaggaagacagcctgggtggacagggttagttcccagaaggaaatatgggaagaatgtgtgtcaggcaggactcttggctcaaggagcaaaatccaaagtttatataaaaagcccagaggtgggccaacgcggtggctcacgcctgtaatctcagcacttcgggaggctgaggcgagtggatcacttgaggtcgggagtttgagaccagcctggccaacacagtgaaaacctgtctctactaaaaatgcaaaaattagcccggcacaatggtgcacacctgcaatctcagctactcgggaggctgaggcaggagaatcacttgaaccgggcaggcggaggttgcggtgagctgagatccagccagtgcacttttttgagacagagcaagactccatctcaaaaaaaaaaaaaaaaaaaaatcccggaggtggccaggcgcagtggcccatgcctgtaatcccagcactttgggaggcctaggcaggcagatcaactgaggtcagcagttaaaaaccagcatggccaacttagtgaaaccctgtctctactaaaaatacaaaaattagccaggcgtggtgacccacgcctgtaatcccagctactcaggaggctgaggcaggagaatggcttgaacccaggaggctacggtgagctgagatcgcctcgctgcactccaacctgagctacagagtggctaatttttgtatttttagtggagacggtacagtggttcatgcctatactcctagtactttaggaagccgaggtgggcagatcacctgaggtcaggagttcaagaccagcatggccaacatggtgaaactccgtctccactaaaaatacaaaaattagccaggtgtgatagcgcatgcctgtaatctcagctactcaggaggctgagacaggagaatcgctggaacccaggaggcagaggttgcagtgagccaatatcgctccactgcactccagcctagccggcagagcaagactccgtctcataaaaaaaaaaaaataataataataataaagtttaccctagcttgggcaacatagtgggattctgtctctacaaaaaataaaaatattagccaggtgtggtggtgctcacttgtagtcccaactactcaagaggctgaggcaggaggattgcttgagcccaggaggtggaggctacagtgagtgatgattgcatcactggattccagcctggataatgacaaaaaaacaaacaaaacaaacaaaaaccctacaaagagcagtaacaacaacaacaaaaaaaaaacagggcgggtacagtggctcacacctgtaatcctagcacttggggaggctgaggtggacggatcacctcaggtcaggagtttgagaccagcctgaccaacatggtgaaaccccgtctctactaaaaatacaaaaattagccgggcaaggtggcgcatgcctgtgatcccagctactcaagaggctaaggcaggagaatcgcttgaactcaggaggcggaggttgctgtgagccgagggtgtaccacttcactccagcccgggcgacagagtgagactctctcaaaaaaaaaaaaaaaaaaaactacaaagagcagtaaaagccatggggtaaagggtaaccatgaagtcaaagagctttactaaagtaagtcattattgagccgggcttggtggcttacgcctgtaatcccagcactttgcggggctgaggcaggcagatcacctgaagtctggagttcaagaccaaccaggccaacatggggaaacctcatctctattaaaaatacaaaattagctgggtgtggtggcagatgcctgtaatcccagctacttgggaggctgaggcaggagaattgcttgaatccgggaggcggaggttgcagtgaaccgagaatacgccccattgcactccagcctggacaacaagagtgaaactctgtctcaaaaaaaaaaaaaaaaaaggaggtacatgagttgtacgcaaaagctacaaaacagttgaagttgtagaataatttttttaaaaaacctaaataaatggaagggtttttttttgtttttgagacggagtctcactctgtcgcccaggctggagtgcagtggtgcactctcagttcaccgcaacctccacctccccggttcaagagactcctgccttagcctcctgagtagctgggactacaggcacctgccaccatgcccagctaatttttgtatttttagtagagccagggtttcgccatgttgaccaggctggtcttgaactcctgacctcaggtgattcacccgccttggcctcccaaagtgctgggaatgaaaggatatttcatggtcctgaattggaagatttaatattgttaagatgatggctgggcacggtggctcatgcttgtaatcctagcacttggggaggctgagggaggaggtttgcttgagcccaggagttccagaccagccttggcaacatggcaagatcccatctctgtattatttttttaaataaaatttcaaagataacaatattacccaaagcaatatatacatattcaatgcaatatcaataaaatactcaatgacaattttttgcagaaatggagaaaccaactcttagagttgtatggaatttcaagacaccccaaatagccaaaataaagaacagtggaggactcacacttctggatttcaatttttttttttttttgagacggagtctcactctgtcacccaggttggagtgcagtggcatgatctcggctcaccacaacctccacttcccaggttcaagcaattctcctgctcagcctcccgagtagctgggattacaggtgcccaccaccatgcctggctaatttttgtatttttagtagagatggggttttgctatgttggccaggctggtctcaaactcctgacctcggatgatctacctgcctcggcctcccaaagtgctgggattacagatggagccactgcacccggcctggatttcaaaaaaattttaaaaagcaatagtaattaaaacagtgtggtatacgataatggcaaaaggatatacatacatggctggcgtggtgttgtgcacctgtaattccagctactcaggaggctgaggcaggagaatcgcttgaacccaggaggtgaaggttgcaatgagccgagattgtgccactacagtccagcctgtgcaacagagtgactttctgtctccaaaaaaaatttttttacttaaaaaaattacataaatattatatgtataatatctaaaaaacaaaatacaaaaatagccagatgtggtggcacccacctgtagtcccagctactcaggaggctgaggcgggaggatcacctgagcccatgagcccaggaggtcgaggctgcagtgagctgtaattgcgccactgcactccagcctgggcaacagagtgagaccctgtctctaaaataaataaataggccgggcgcggtggctcacgcctgtaatcccagcattttgggaggctgaggcagggggatcatgaggtcaggagatcgagaccatcctggctgacactgaaaccccgtctctactaaaaatacaaaaaaaaaaaaaaattaggtgggcatggtggcgggcacctgtagtcccagctactcgggaggctgagacaggagaatggtgtgaacccaggaggcagagcttgcagtgagccgagatcacgccagtgcactccagcctgggtgatagagtgagactccatctcaaaaaaaataaaaaataaataaataaatacaagctagaagggttttgaatgttcacaatacaaataataaatgtttgaggtgatggatatgctaattaccctgatttgatcattacacattgtgtacagaaatcaaattatcactccatatcccataaacacatgtaattattatgtgtaaaataagaaataaagaatttatgagaaattatttgctacagagcagacatcattgtctggagaggcagtaattacacaaagttatagaagccgaggagcaattgggaaggttctgatctcttttaggcacctgtggctgagtgaaactcatcaccaaaacaagccccatctgaacccatgcacgcagcaagatcaacagaataactctgcgcacatttcacaggctctttggacaaatgtatggggtgtcctcacctgagtttgcactaaacctggagtcatttatttcacaagttttcacaacaccaagggtcagcaaactctctgttaagggccggttagtaaatattttactagacacatattttgcagggcgcatatgttctctgtcatgtagtcctctttatttttacaagctttaaaaaatgtgaaaactggtagggtatggtgagtcacgcttgtaatcctagcattttgggaggccaaggcgggagaatctcttgagttcaagagactagcatgggcagcattgagagacctcatctctacaaaaaatggaaaacttagaagggggtgatggcgctcacctgtagtctcagctactcaagaggctcaggtgggaggatcccttgagcctgagaggtcaaggctgcagtgagctgtgatttcagaactgcactccagcctgggagtcagagtaagaccctgtctcaaaaaaaataaaaagaaaaagaaaagaaaaaaagaaaaatgtgaaaaccactcttacccctagaatgtacaaaaagatcctggaacagtggtgcacacctgtaatcccagcactttagaagccaaggcaggacgccccgtccgggagggaggtgggggggtcagccccccgccaggccagccgccccgtccgggaggtgaggggcgcctctgcccggccgcccctactgggaagtgaggagcccctctgcccggccaccaccccgtctgggaggtgtacccaacagctcattgagaacgggccatgatgacaatggcggttttgtggaatagaaaggggggaaaggtggggaaaagattgagaaatcggatggttgccgtgtctgtgtagaaagaagtagacatgggagactttttattttgttctgtactaagaaaaattcttatcctgttgatctgtgaccttacccccaaccccgtgctctctgaaacatgtgctgtgtccactcagggttaaatggattaagggcggtgcaaggtgtgctttgttgaacagatgcttgaaggcagcatgctcgttaagagtcatcaccactccctaatctcaggtacccagggacacaaacactgcggaaggccgcagggtcctctgcctaggaaagccagagacctttgttcacttgtttatctgctgaccttccctccactattgtcctatgaccctgccaaatcctcctctgcgagaaacacccaagagtgatcaataaaaaaaaaaaaaaaattaaaaaaacaaaacaaaacaaaacaaaaaaaagaagccaaggcaggagaatcactagaggacaggagtttgagaccagcctgggcaacagagcaagactctggcctgggtgcagtggctcatgcctgtaatcccagcactttgggaggccgaggtgggcggatcacctgaggtcgggagtttgagaccagcctgaccaacatgacgaaaccccgtctctattaaaaatataaaaattagccagtcgtggtggcgggtgcctgtaatcccagccactcaggaggctggggcaggagaattgcttgaaccagagaggcagaggttgcagtgagctgagatcgcaccactgcacttcagcctgggagaaagagtgagactcccagttaccggggaggctgaggcaagagaattgcttgaacctgggaagcagaggttgcagtgaactgaactaggaaagaaaaaaaaaagatggggttttgctatgtttcccaggctgctcttggactcctgggctcaagtgattctcccacactggcctcctgacctcaggtgatccgcccaccttggcctcccagagtgctgggattacaggcttgagccactgtacccagccccctccaggatttttacagttggacatctcacatttaaatctttagtcttgagtcaatttttcaatatggtgaaaggtaggagtccagtttcattcttttttcttttttttttttttttttttttttagaaaatcctaggccaggtgcagtggctcacacctgtaatcccagcactttgggaggcccaggtgggtggatcacttgaggttaggagttcgagaccagactggccaacatggtgaaaccctgtctctactaaaaatacaaaaattagtcggttgtggtgatgggcacctgtaatcacagctactcaggaggctgaggcaggggaattgcttgaacccaggaggcagaggctgcagtgagctgagactgcgccactgcactccagcctcggtgacagagggagaccctgtctcaaaaagaaaagaaaatcccgttaattattctaccaaaaagacatgtgtactcatatgttgattgcagcgctatgagtgctgacagtctcactctgtcatccaggctggagtacagtggcgtgatcttggctcactgcagcctctgcccaccagactcaagcaatcctcccacctcagcctcccgagtatctgggactgcagacacgtaacaccactctcagttaatttttctttaatttttgcagagacagggtctggccatgttgcccaggtcagttttttttttttttttttttttttgaggcagagtttcactcttgttacccaggctggagtgcagtggcgcgatctcggctcaccgcaacctccgcctcctggtttcaagcaattctcttgcctcagcctcctgagtagctgggattacaggcatgtgccacgacgcctggctaatttttgtatttttagtagagacagagtttcaccatgttggtcaggctggtctcaaactcccgatctcaggtgatccgcccatctcggcctcccaaagtgctgggattacaggcatgagccaccgtgcccagcccgcccaggtcagttttgaactcttggactgaaagtatctcatcttgccctctgaaagtgctgggattacagacatgagccacactacaccctgcccagtgtcaaccttctgcatatggctagccggttatcccagtggcatttattgaataggaagtcctttccccattgcttgtttttgtcagttttgttggccatcagaaggttgtaggtgtgtggcttcatttctgggttctccatgctgttccattactctatgtgcctctttatttttattttattttattttatttttttgagagacagtctcaccctgtcacccaggctggagtgcaatggcgcaatatcagctcactgtaacctctgcctcccgggttcaagcaattctcctgcctcagcctgccaaatagctgggattacaggcatgcaccatcacgcccaggtaatttttgtgcttttagtagagatggggtttcaccatgttggccaggctggtctgaaactcctgacctccaatgatctgcccactttggcctcccaaagtgctgggatcacaggcgtgagccactgtgcctggcctatgtgtctttttgtaccagtaacatggtgttttggttactgtatacttcttttgttttacatttactggcttattataaaggacattacaaaggacacagacgaagagatgcataggacgaggtatgggagaaggggtgaggagtttccgcgccctccctcggcacactaccctccaggaggcatccaagtcttcagctatcaggaagctcctagttactgtttccttgtacagtttgaagctggaatgtcatgcctccagttttgttcttttggcttaagattgctttggccattgggctcattttaggctccatatgacttttacaatagtttttttttttttttttttgggacagtctcactctgtcacccaggccggagtgcagtggcgtaatgtcagtttactgcaacctctgcctcccaggttcaggcaattcccctgccttaggctctcgagtagctgagattacaagcacgtaccaccacacctggctaatttttgtatttttagtggagaaggggtttcgccacgttggctacgctggtctcaaactcctggcctaaggtgatccgcccgcctcggcctcccaaagtgctgggattacaggcatgagccaccgcgcctggcctacaatcattttttataattctgtgaaaaataatattggtagtttgatgattctagattgctttgggtaatatggccacttaaaaattattttaattattaaaattgggggtacatagtaggtgtatgtatttacgggttacatgaaatattttgaaacagacacacaatgtacaataatcacatcagtgtaatgggatattcatcacctcaagcatttatcctaatatggccttttgttttggagatggagtctcactctgtcgcccaggctggagtgcaagggcacgatctcagctcactgcaacctccgcctcccaggttcaagtgattctcctgcctcagcctcccaagtagctgggattacaggcgcctgctaccacgcccggctaatttttgtatttttagtagagacaaggtttcaccatgttggtcaggctggtctccaactcctgatctcgtgatccacccgcctcggcctcccaaagtgctgggattacaggcgtgagccaccttgcctggcaatgtggtctttttaacaatattgattctgccaatccatgagcaaggaaagttttttcatttgtttgtgtcaaggatttctttcagcagtgttttgtttgttttttgagacagagtctcactatgtcacccaggctggagtgcagtggtgcaatctcagttcattgcaacctccgcctcacaggttcaagtgattctcctgcctcagcttcccgagcagctgggactacaggtgcacagcaccacgccgagctaatttttgtatttttagtagagacagcgtttcaccatgttagccaggctggtctcgaactcctgacctcaagtgatccacctgcctcagcctcccaaagtcctggggttacaggcatgagccactgcacctggcctctttcagcagtgttttgtagttctccttgtagagaccttccagttccttggttagatctgttcctaggtatttgtgtgtgtttgtgtgtgtgtgtgtggctattgtaaatgggattccgttcttgatttgactctcagcttgaacattattggtgtatagaaatactactgattttcatacattgatttcatatcctgaaattttactgaagttgatcagttctaggagccatttggcagagtcttcagagttttctaggtatagaattatatcatccgtgaagagggataacttgacttcttcattccattcccttttgggatgccttttcttcctttctcttgcctgattgctccgactaggacttccagtactatggggaacaaaagtggtgtgagtgggcagctttgtcttttgcctgttcttaaggggaatgcttccagcttttgcccattcagtacgatgttggctgtgtgtttgctatagacggctcttactattttgaggtatgttccttcaatgccaagtttgttgagggtttttatcataaagggatgttgggtttttttttttttttaagatggagtctcgctctgtcgcccagactgtggcacaatctcagctcactgcaacttcaacctcccggattcaagcaattctcctgccttagcctcccaagtagctgggattacaggtgcctgccaccatgcttggcttatttttgtatttttagtagagacagggtttcaccatgttggccaggctggtctcgaactcctgatctcaggtgatccacccacctcggcctcccaaagtgctgggattatgggagtgagccactgcagccggccaggtgccagaattcttaacactggttccttctcatctagaaactctggcccttctaatttctgtaattattttcatgtggatagaaactttttctttttctttccctacattattattgtccgcctcccctttcccctactccctagggagtgtgattgcatagaatgttgggtaggctttttggccttgtttctataggcttatgcagtttttttttggcaggttttatttatttatttatttagagatgaagtcttgctcccatcgcacacgctggagtacaatggcaccatctcggctcactgcaacctccacgtcccgggttcaagcgattctcctgcctcagcctcccgagtagctgggattacaggcgtgcaccaccatgcctggctaatttttgtatttttagtagagacagggtttcaccatgttggccaggctggtctcaaactcctgacctcaagtgatctgcctgcctcagcctaccaaagtgcaaagattacaggcgtgagccactgtgcctggtctttggcaggttttgttttgttttgttttgttttgttttgttttgttttgagacagagtctcgctctgccacccaggctggagtgcagtggcatgatctcagcttactgcaagctccacctcccgggttcacgccattctcctgcctcagcctcctgagtagctgggactacaggcgcccgccaccatgcccggttaattttttgtatttttagtagagacgggatttcaccgtgttagccaggatggtctagatctcctgacctggtgatccgcccgcctcggcctcccaaagtgctgggattacaggcgtgagccaccgcgcccggcctggcaggttttatattggactgtgcagttcaacctacaggccaggagatggcacttcgggctgaaagttgccggcagcagaagcaggtgggcatgtacctgatcttggtttcctgggaggtactgtctgttgtttcaggtcatgggctggagcatggagtgcccggtgccatgagcttcctgttccctggggtgggggacacggctgggcagagctggagcccatagcttgcacaggaataccccaatgatgaaggcaggcaccaggccgatgagggtggctgagaggagctccaggtgaaatgcgctgaggcctctgtgtagggctgaggggtgaggatattgcaccggctcctcatctagattggcaggaacgtgaatcgtgtccctgtcacacccctatcgtggggttcgtggctcctagttcagatgcacactgtactcctttcttctttttttttgagatagtcttctcctgtcgcccaggctggagtgcagtggcatgatctcagctcactgcaacctccgcctcccaggttcaatcaattttcgtgcctcggcctcccaagtagctgggattacaggtgccaaccaccacgcccggctaatttttgtatttttagtagagacagggtttcagccaggctggtcttgaactcctgacctcaggtgatccactcgcctcggccttccaaagtcctgcgattacaggcgtgagccaccaagcctggccactgtactgcttttttttttttttttttttttttttttgagatggagtctcgctccgtcacccagacttgagtacggtggcacgacttcggctcactgcaacctccgccttcgggattcaagtgattatcctgcctcagcctcccgagcagctgggattacaggtacataccaccacacctggctaatttttgtatttttagtcgagacagggtttcaccatgttggccaggctggtctcgaacttctgacctcaagtgatccacccaccttgtggctcccaaagggctaggattacaggcatgggccacatcacccagccagcacactgcactgtttcccaggaccacagtgtggtggagagcctcgggaaacgcctgtttcgtggctctctatggagtggttttggagctgcacatggtcactcagcctggtccagggagatttagggctcacctggcctctcatatggtggcactgctgcttcatgtaagaggggcaccacctctggggctgtgcaggtgtgtgttgtggtggtggccagctggctgggcccaacctcaggccctgagggaagtggtcgggtaccagcagtgctggaatggggtgggcagtaccccaattccctgagccctagatggcccactggaatgcatggatgagtgagtcccattgggactggaatggaggtggggctagagcagcgtccagtgctgactctgatggtggggtacgggctggtcccctgctcactggccaactctccagcgggtgcaggcagagtactccggcggtgggagcctggggggtgatcccaggcctgtcggatagggttggcagacgggcactctctgggtcacagctgaaacacctggggagtgtgggggtgggcaccggaagccaggaggtggcaagcccctctgggcagggagcctgtggtagacagtctggagccatgggaaagttggggccccagcctgagggcagcagtggcaggaccgcagtggcagccaccacggagggcctgtcagttacctctgggagtttcctgccagaggaatgtggaggccaccgaccagggtgctgaggccagggtgggtcagctgtgctgggggcccaagccggtcagcctggcctggcaaggagcagcggaggcaaggcctgaagcccatccatcccctcctcagtgcgatcctagtgtaacttcgccaggggtcctttccaccctctgcataaagacagaccagggcatggcaggagagaaagagtttgacagacacgaggccggtcatgccacgtgggagatggagttcatactcaaaccatccaaggctcacaggttaggttttcaaaggcagtttggaggaagtaaaatcaaaggcaacttggaaggggttggggggggggtccccaggttacagatgcttgctactgattggttggggcagagatgaactcctaggcctcctgggggccaattcgcatttaagtggggccaccggagcggcattgttggtccaggtgcagccgagggtgtcagacatgcaaaaaacctggaaaggtatctcaaaaaccaactggggaagctgtttatcttacaacttctggaacgtcagcgccttagctggattcaggttcctttcactgcctcagcctgatgggctcctattagctttacaaaagcagttgagtttgcagtaaagcctattatcatttaaactgtagcctaaatgtcttccaaaattagcttggcccaacagcccaggattaattgagggtgagttagcttagtttactattcgcattttctcactgacagaactttcgtacaggcggcttcactagcaggcggacaaagagcctggccttccttgttgctggggctgtggcagctgacaacagggtgctcatggggtgtgcagggatccaaggcctgtggggctccgcacgggcttgaacggtgctctgcggagactccaggctgcctccatgttgctctggaagctcagggggtcaggggggctcttctccgcccaggattgcaaaggattgtgttagaagtgtgggtccctggccgggcatggtggctcacatctgcaatcccagcactttgggaggccaaggcaggtggatcacccgaggtcaggagttcaagaccatcctggccaacgtggcgaaacccccttcactaaaaatacaaaagattacccgggcgtggtggcgagcgcctgtaatctcagctactcgggaggctgaggcaggagaatcgcttgaatccgggaggcagaggctgctgtgagccaagatcacaccactgcactccagcctggacgacaagagtgagactccatttcaaaggaaaaaaaagtgtgggacccccagggactctcactcttaccctttctctgcatcagggagcttcccccaactccgctgcaatcccaggagggcagctgcccaaccttgcctgttctccaagtcccaccgcagccctggtgaatcccagcatggtgttctggtctatgcccttgaagaccgggcagttaccctgtttcctctccatgaaagcagcgcactggggggaggggggagggatagcattgggagagatacctaatgctagatgacgagttagtgggtgcagcgcaccagtatggcacatgtatacatatgtaactaacctgcacattgtgcacatgtaccctaaaacttaaagtataataataataataataaaaaagcagcgcacactagctgcgtccaccagccatcatgaactgcaacccacaatcacatttgttaatagtaaaatattttcatactttattttatttgtatattttatattaagttaatattttatttttataatgattatatgttaatgttttctattgattaatgttaatattttgggtattagaatgtgggtattttgggttagaatttcaagttatttttgctttttttttgagaagagtctcactctgtcacccaggctggagtgcagtggcgcgatctcggctcactgcaagttctgcctcctgggttcacgccattctcccgcctcagcctctggagtagctgggactacaggtgcctgccaccatgcccggctaattttgtttttgtattttagtttcaccgtgttagccaggatggtcttgatctcctgaactcgtgattcgcccgcctcggcctcccaaagtgcttggattacaggcgtgagccaccgcgcccggcctatctttgcttttttaatgtggctactagaaatattaaaattacatacttggccgggcgcggtggctcaggcctgtaattccagcactttaggaagctgaggcgggcaggtcgcctgagggcaacctggccaacatgttgaaactaaaaaatacaaaaattagccgggcgtggtggtgcatgcctgtaattccagctattccggaggctgagccaggagacccctttgagcccaggaggcagaggttgcagtgagccaagattgcgccactgcattccagcctgggcaagagcaagactgtctcaaaaaaaaaaaaaaaaaaagaaattacatacttgctctcattgtatttgtttggacagcaccagttctagatacaaatgtggcagtatttttcaaaatcttttattcttgagacagagtctcgctctgtcacccaagctggagtacagtggtgcaatctcggctcaatgcaacctctacctcctgggtttaagcgattctcctgtctcagcctcctgagtagctgggattacaggcgtgtaccaccatgcccaactaatttttgtgattttagtagagacggattttcgccatgttggccaggctggtctgcaactcctgacttcaggtgatccgcccgcctcggcctccagggctggaactataggcgtgagccaccgtgccaggccaaaaatctcttaatgtctattctttgagtcaacatttccacttattacactgctttttgttttttgttttttgtttttgagacagaatctagctctgtcacccaggctggagtgcagtggtgcaatttcagctcactgcaacctccacctcctgggttcaagcaattctctgcctcagcctcctgagtagctgggattacaggcgcctgccatcatgccagactaatttttgtatttttagtacagacggggtttcaccatcttagccaggctggtcttgaactcctgacctcatgattcacccacctcagtctcccaaagtgctgggattacaggtgtgagccaccgtgcccggccacaccatttttatagcattaatttaactttcttccatgatgtagatacatggacattgtcatttacccaaggaacttcctgttatatcctcaggatctccttagtaaaaattacactgatcagactttctatgcagtatgtggcaaaactcatgaggatatcggaggaacaatctaccttctctcttttgccagactggactgacagtcattcagctataatgtagcaagtgaactagacaactgaaactttaaataaggacacaaaatgagagagttaagtattttgacaaaagtcttaggtgaaatcaagccaactgctctgcaggcagggactttaatggtaagacacatcctgagtaaacaggtagaatgccgttgcgcttcaagccatgccgggaaacagaagaggagccgaggtcaggaaagattgagggcatctgtggaattcgcaattttactcaggatgtaaggttaagtcttgctaagaatgtgactttcagtaaagatcagatacaagtgtcctagaagacgccagagaaaatctgtttgaagtaaacatgatggccgggcacgctggctcacgcctggaatcccagcacttttagaggccagaggcaggaggatggcttcagctcaggagttcaagaccagcctcggcaacaaggtgaaactccatctctactgtaaatacaaaaattaccctggtgtggtagcgcatgcctgtattcccagctactcgggaggctgaggcaagaggatcacttgaggccgggagttccagaccgcacctggctatttttttttttttttgagatgaatttcactcttgttgcccaagctggagtgcaatggtgcaatctcagctcactgcaacctctgcctctgggttcaagcctcagtctcccgagtagctgggattacaggcacctgccactgcgccccagctaattttttgtatttttagtagagacagggtttcgccacgttggccagactggtcttgaactcctgacctcagatgatccacctgccttggcctcccaaagtgctgggattacaggcatgagccaccgcacccggccattttaaatgtttttaccacaaaaaaaaaaaaaaatggcacgtaaggctgggtgtggtggctcacgcctgtaatcccagcactttgggaggccgaggcgggcagatcatgaggtcaggcattcgagaccagcctgaccgacatggtgaaaccccgtctctactaaaaacacaaaaattagccgggaatggtggggcacacctgtaatcccagctactcaggaggctgaggcaggagaattgcttgaacctgggaggcggaggttgcagtgagctgagatcacactactgcactccagtctgggcgacagagggagactccatctcaaaaaaaaaaaaggtatgtaaggtaatgaatacgttaatcaacctgatttagcaattccacaatgtatacatatttccaagcttcatgtataccataaacatacacaattttaatacatataatatatgcaattgtacaccataaacatagacaacttttatttgtcaatttttaaaaatgtaagtttttaaagttattttggctgggcacggtggctcaggcctgtaatctcagcactttgggaggccgaggcaggtggatcacttgaggtcaggagttcaagaccagcctggccaacatggtgaaacctggtctctactaataaagaaaaattagctgggcacagtgtcatgtgcctgtaattccagctactctggaggctcacacaggggaatcacttgaacccgggaggcggaggttgcagtgagccaagatcatgccactgcactccagactgggcaatagagcgagactctgtctcaaaaagaaaaaaaatcaaatcaaataaagatattttgttaagctgggtatgatggggtacctgtagtcccagctgcttggaagactgaggcaggaggatcacttgagcccaggagttcaagttccgcctgggcaacagagcaagtcctcacctctataacaaacaaacaaacaaacaaacaaacaaacaacaaaataaagttttttaaaaagtgtttgctcactggcaatgcacaaggggctttaagtgtatcccaccttcatgctccacagagcttcacactttcccttcatccagaggacacctccagtggactggaccatcccttttccgtggttaaactaattcagcaagggactagggatgttttcatgaggagtttgggagcttgacgctggtggctgttgattgttctccaagctgtgtgggatcccatatccaaaatacatagcaaatcctagcagggaaatgagacaatgaaaggaaatgtagtcaccccttcccttataaatgccctatagcgattatactgtggtttgtttatttggaggttttcttgtttcttttatttagaaatagagcttcgctccattgcccaggctggagtgcagtggcatgatcatggctcactgcagcctcgacctcctgggttcaagcgatcctcccacctcagccttcagaatagatgtgactacaggcaggtgccaccgtgcctggctaatttttttttttttttttttttttttttgagacagcatctcactctgtcacccaggctggagtgcagtggcacaatctcagctcctgtcgcctgcgctggagtgcaatggcatgatctcggctcaccgcaaactctgcctcctgggttcaagcaattctcatgcctcagcctcctgagtaggtgggattacaggcgcccgccaccacgcccggctacttttttgtatttttagtagagatggggtttcaccatgttggccaggctgttcttgagctcctgatcttaggtgacccacctgccttggccccctgaagtgctgggattataggtgcgagccactgcgtgcggccagttttttattttggtagaggtggagtctcgccatgttgcccaggctggtctggagctcctggtctcaagcgatgctcctgccttcatctcctgagtagctgggactacaggcacaccccacactgttagcctgagacagctatagggaaaggtcgcaggaagagtgttgggctcagacacccaagaggcctctttttttccaggaagccactcaccaatcaacatccagactccacattgggcccaggtctcagtggtcatctgcatcatcaggtaaacatgtgcagagatgctgaccagaggagaacaggcaacagggggacctgcaggcaaagcgttaaccgtgagcacaccacgaacgtctgcaagggacccttattccaaggggtgggaaggcctcagctctgttgcagtcgcatattcaatgcctattcttttttttttttttttgagacagagtcttgctgtgtcacccaggctggagtgcagtggcgcgatctcagctgaatgcaacatccgcctcctgggttcaagcgattctcctgcctcagcctcctgagtagctgggattaccggcacacaccaccatgcccggctaatttttgtatttttagtagaaccggaatttcaccatgttggtcaggctggtcccgaactcctcgcctcaagtgatccacccgccttggcctcccaaagtgctgggattacaggtgtgagccacctcacctggctcaatgcctgttctgagtaggtattccattgggtgttctggaagagacaggttttgggaagtactgatatgtgggggctggagggggtgtccatgaacagtccattggtttttcgcaactgccctttttacccctggtcccgtagagtatttagagcttgaggcatgcagagtccactgactcaggagggtggtgtggggacataaggccacctaccttgaagtaaagaggagtgttgctctggggctgtctccagacggtgaaagtgaatcccacaatgagcaccagcagcaacacagccgctgcgatgtagatcagctctccagagaacaggcgtttgggccaatgggccaataccaggcatagcatggacagcaggacaactggaaaagggtcaaggttggggagaacaggttcaacttcagaagctaaataagtgaagatctcgggccacatcctatcccccaaaccatatatatgggtatgggtgtgtgtgtgtgtgtgtgtgtgtgtgtgtgtgtgtgtgtgtgtgccagcctcccaagtagggactacaggcacgtgtcagcacacccaaatactttttttttttttttgagatgcagtttcactcttgttgcccaggatggagtgcagtggcacaatcttggctcactgcaacctctgcctcctgggttcaagtgattctcctgcctcagcctcccaagtagctgggattacaggtaactgccaccacacccagctaattttttgtattttttttttttttttgagaaaaagtctttctctgttgcccaggctgaagtgcagtggcgtgatcttggctcactggaaactcggcctctccggttcaaataattctcctgcctcagtctccccgagtagctgggattacaggcgtctgccaccgtgctcggctaatttttgtatttttagtagagatggggtttcaccatgttggccaggctgatctcgaactcctgaccttgtgatccactcccccccggcacccggcctcccagagtgctgggattacaggcgtgagccactgtgcctgacctaattttttgtatttttagtagagatggggtttcaccatgttggccaggctggtctcaactcctcacctcaagtgatccacttgcctcagccttctaaagtgagccaccacacccagcctaaacttttaattttatatatatatatttgtgtgtgtatatgtatgtgtgtgtgtgtgtatatatgtgtgtgtgtgtgtatatatatatatggctttttgtttgttttttgagatgggatctcgccccattgcccagactacagtgcagtggtgtggtcttgattcactgaagcctcgactgcccaggctcaagcagttgtcccgcctcagcctcccaaagtgctgggattccatgtgtaatccactgtgcccggccaaaagtgcgcctactaagaagggccaccacatcttcacaactcctctcaactaccaaagccccacactccctactcggccccctgccgcatgctatcaggttcaaaacaccccgcggagaaacgccactgctcaccaagcagaaaggcacatccatagacgatgcggccccatctcggggtggggatggtgctgacagggctccacagactcgccggagtgctggacgcttcaggaacacatgctggggattctgctttgggtacagaattcatctcaactacttcctccttcggcttctcgttcttgctgaaattctcgtctggctggtacctgaattagagagagtagggcaagattaacccaggtccctgttcatccaacatcagagagcctaatacacccacggtagctcccacgtatctgaggtttcatctacccgtatccactacagtccaaaaatagtaaatggaaaagtccagcagtaatttgtaagttttctttctttttttcctttttttcttttctttctttttttttttttttgagacggagtctcactctgtcacccaggctggattgcagtggcacaatctcagctcactgcaaccacccccgcctcccaggttcaagcaatctcctgcctcggcctcctgagtagctgggattacaggagaccaccaccacgcccagctaatttttctatttttaggacataccaggtttcaccatgttggccaggctggtctcaaactcctgacctcaagtgagccacctgtctcggcctcccaaagttctgggattacaggcgtgagccaccgcgccccgccgtaattgataagttttcaattgtgtgcagcttcaagtagcggcattccacgctgcccatgcccaggatgtaaatcatccttttgtccagtgtgtccatgctgtgaacgctaccggccgtgttaagtcacattaggcaactgagttatggatgggaaaatgatcatgtatagggactggtactatccgcggtttcgggcatgtactgggggtcttggaacgtgtcccccgtggataagcaggggctgttgtactcctcccactcctgtatgtgtagcaatgcaccgaggggccaggaggcaggcagaagagggctgggaaccccatcaatcctcacgtgtctaggaccccagtctcacctgaggacaagaacagaaaaagccaccaaggagtaagcaagcatagtcccgatggacaagaggctcacaaggtcactgaactcaaacaggaaagccatgattgctatagtcagggctcaaaacagggtgagttccaatgttccacagcactagagggtgactgtcgttaacaacttataagagctggaaaagcactttggaaggctaaggtgagcggatcacctgaggtcaggagttcaagaccaccctggccaacatggtgaaacgtcatctctactaaaaatacaaaaattagctgggtgtggtagcacatgcctgtaatcccagctactccggaggctgaggcaggagaatcgcgtggacctgggaggcggaggttgcagtgagctgagatcgtgccactgcactgcagcctgggctacagagcgagactctgtctccaaaaaaaaaaaaaaagagctggaaaaataggttttcagtgttcccaatgcaaggaaataatcaatgtttgaagtgatggttatgatattaccttgatttgattattacatcttgtatacatgtatggaaatatcacactgtaccccacgaatatgtacaattattgtgttaattaataataggaatgtggccaggtgcaggggctcatgcctgtaatctcagcacttagggaggccgaggcaggcggactgcttgagcccagaggttccacatcagcctgggcaacacagacccccgcctctacaaaatttgaatattagccaggtgtggtgccactgtacactggcatgggtaagagtgagatcctgtctcaacaacaacaaaagtcagattatgtacattttctttaattttttttttttaaacaggaatcatcatacctccctgcagccctaacctgctgcgctcaagccatcctcccacctcagcctcccgagtagctgggactacaggtgtaccaccacacccagctaatttttttttttttttttgagacggagtctcgctctgtcgctcaggctggagggcagtggcgcgatcttagctcacagcaagctccgcctcccacagccaactaattgttaaaaatttttttgcagagacaaaaaaatgatctcagggtctggctatgttgcccaggctggtctcaaactcctgggctcaagtgattctgccttggcctcccaaagtacgggggttacaggcatcaggcactgcaccccgccccattttctatattgtattgtattgtatttattttaattattttattttattttgagacagggtcttgctttgtcacccaggctggcgtgcagtggtgtgacctcagctcactgaagcctcaacctcctgggctcaagcaatcctcccacttgagcctccccagtagctgggactacaggcacgttccagcatgcctggctaactttttttttaatttttgttgagatggaagtctccctgtgttgcccagggtggtcttgaactcctgggatcaagcaatcctcccacctcagcctcccaaagtgctggggttataggcgtgagccactgagcctagtcccattttcctgttaaactttttattaaataaacttttgtaatagccaactttttaaaaaaattgatgaataataataaaagcaaaaatggatgggctgtgggggaggatgaggaactaactcatagaaaatggatgaaagaaagcctggattctgggcctttacctgcaagggtcccagcaacgacagtggccaccacaggggtgctggtgtgggcgtggatccgggcgagtccgcagaaaaggagcctgtcctcagccattgactagagcacgcgaggcgtggggaacgtggcacccaggaggctgcatgcaggagaaaacgggaacacgcatggggactcaggaagcaagagggactggggcttctgctctgtcgcctccgtgggtgaaacgtctcctccctttaccaaggcccaggacacccgagaaccagacagcagacagggagagagcatccagcactgacctggaggaaagggcacagagggtgccgacggccacagcatatctgatgggggcccatccaatgtggacaaaagcctccggcaaggggttctcgggacatatcaggtagtaggggcactatgagggtgagcgccgctgagacaccaaaataggccaagaagcagatgaagatcgaggtcacagtgcccaaggggatggagcggtgagggtggaggcggtgagggtggagggcttcttctcctgcgggacaggtatatgcaccgggcggtgagggtggagggcttcttctcctgcgggacaggtatatgcaccgggcggtgagggtggagggcttcttctcctgcaggacaggtatacgcactgggccaggaaaatgcacggaagtgaaggtacaaaaccctcttccctcttccccatctgagaacagggtagcctttaatgaaacctgtgcccagcggcagcccaaacagtgcccaaacccccgatgagacagaatgaccgtgttacctgtggtggcaatgccatcaaaacccacaaatgcaaagaaacacgtggccgctccatggagaatcacgccaaagccaaaaggcacaaaccctccagagcccagggagcccgagctacggggacagaaggaacaagaaacattggtaaggtgtgcagccgtctttctgggacgactcagttaactccaactgctcagttaattccacaagcccggggcccccactgccatccccactccccatcatctggctccgtcaacccagattccccctattcccacaatagtccaggttctgcaccccaggccccactcctgtgtccaagagggcacctctggccagttgcaatggctcacgcctataatcccagcactttgggaggctgagtcaggtggatcacttgagcccagaggttgagaccagcctgggcaacatggcaaaaccccatctctacaaaaatttaaaaacttagctaggtgtggtggtgcacacctctagtcctagctactctagatgattgcttgagcctgggaggtagaggctgcagtgagccatgatcgtgctactgcactccagcctgagggacagagcaagaccctgtttcaaaaaataaaaataagttttaggctgggagcagtgagtggttcacacctgtaatcccagcactttgagaggccaaggtgggcagatcacctgaggtcaggagtttgagaccagcctggccaacatggtgaaaccccgtctctaccaaaaaaaaaaaaaaaccaaattggccgggtgtggtggcacgcacctgtaatcccaggtggctgaagcaggagaatcgcttgaacccgggaggcagaggttgcagtgagctgaaattgtgcgaccgaaatttggcctgggcgacagagtgagactccatctcaaaaaataaaaataaaggtaaatttgaaaataaaaaaacaggccaggcacagtgggtcacacctgaaatcctagcactttgggagtcagaggtggacagatcaatggaggtcaggagttcgagaccagcctggccaacgtggtaaaaccccatctctattaaaaatacaaaaattagccgagcatggtggcaggtacctgtaatcccagctactcggaggctgaggcaggagaatcgcttgaacccgggaggcagaggttgcatgagccgagatcgtgccactgcactccagcctgggtgacagagtgagactccatctcaaaaaaaaaaagtaaataaataaataaataaaaataaataaaaattaaaattaaaattaaaaaataaaaaaaaataaaataaacctgtgccctcacctgtgggtgtcgttggaccaccccagctcggcccatttgtagtcggcgtctgtgagctgccagttgtgcagatctcccttgatgaagccggagaagatgacgcagctcagaaccaaaaggttcacacctgtgaagactttggaaccccaggctgactcccgagctcccagagccagcagtcctgtgggaaacatggaatatccagaataaataaacccacagagacagaaggcagatccgtggttgccaggagccaaagggaatggggaacgaccgcctaaagggtgcagggtttcccgcaggggtgatgaaaacgtttcccaattagatggaagtggcagctgcacaatgccgtggatgtactaaatgccactgaactgcatgctttcaaatggttcatttcaggccaggcgcagtggctcacgcctgtaatcccagcactctgggaggctgaggcgggcggatcacgaggtaaggagattgagaccatcctggctaacatggtgaaaccctgtatctactaaaaatacacagaaaaattagccgggcatggtggcgggcgcctgtagtcccagctactcgggaggctgaggcaggagaatggtgtgaagctgggaggcagaggttgcagtgagccaagatcgcgccactgcactccagcctgggcggacagagtgagactccgtcaaaaaaaaaaaaaaaaaaaaaggaaagaaaagaaagaaagagaaagaaagaaagaaagcgagaaagaaaagaaagaccttacaattcatttggaaacaaaaagagctcaaatagcaaaaggaatcctgaacaaaaagaataaagctggagacatcatgttacctgacttcaaaacatatcagaaggctctggtaaccaaaacaacatggtattggtataaaaacagacatatggctgggtattgtggctcacacctgtaatcccagcactttgggaggccaagaggggcagatcccttgagctcaggagttcaagaccagcctgggcaacatggtgaaaccccatctctacaaaaaatacaaaaattagctgcgcatggtggcaggcgcctataatcggagctacccaggaggctgaggcaggagaagcgcttgaacctgaagactgaggctgctgtgagccaagaccacaccactgtactttagcctgggcgacagagcgagactcggtctcaaaaaaaaaaaaaaaaaaaaaaaaaaaaaaacaaccaaaccagaaacaaaaaaaaccccaaacatatagagcaatggtacagtatagaaaatccagaaataaatccacgtgtgtaccggctggccaccgtggctcactcctgtaatcccagcactttgaaaggccgaagtgggcagatcacctgagatcaggggttctagaccagcctgaccaacatggcaaaaccccgtctctactaaaaatccaaaaattggctgggcataatcccagcactttgggaggccaaggcgggcaggtcacctgaagtcaggagtttgggaccagcctggccaacatggtgaaaccctgtctctactaaaaatacaaaaattagctggacgtggtggcacacacctatagtcccaggtacttgggaggctgaggaaggagaattgcttgaacccgggaggtggaggttgtggtgggctgacatcatgccactgcactccagcctgggcaacagagcaagactccatctcaaaaaataaaaataaaaataagccaggggtggtgcccacacctgtaatcccagctacttgggaggctgagtgaggagaatcacttgaacctgggaggcagaggttgccgtgagccgagattgggccactgcactccagcctgggtgacaagagcaaaactgtgtctcaaaaaaaaaaaaaaaaattaggcgggtgtggtggcatttatgcctgtaatcccagctactcaggaggctgagccaggagaattgcttgaaactgggtggcagaggttgcagtgagcagagatcacaccattgcactccagcctgggcgacagagcaagactctgtctcgaaaaaagaaaaaagaagaaggaaaaagaaatgatccatgggtgaggggttggatatcctagatgccgtgacatgatgatcattacctactccattcatgtatcaaaatatcacgtgccccattaatatgtacaattattatgtatcaaataagaaaaaagttcccttcattggctgttttaattttataccaccctaagtgaaatattgccacttagaaagcttagctgcaggtttagtaaattatagtgaagaaacacacctgaagctggagctctgccgggggcaggtgcaagggctgatgtggagtcccagcttgtccaaccagcggcccataggctgcctgcagctcaggatggctttgaatgtggtcccacacaaattcagaaactttcttaaaacattacgagtttgtttgtgattctgggtttttttcagcccatcagctatcgttagtgtattttatgtgtacccggagacaattcttcttcttccaatgtggcccagggaagccaaaagattggacaccactgattgtagacaaataaggaggccaccttcagacagagcactgtacgctgttttgttcttgtttttctttgagatggagtctcgctctgtctcccaggctggagtgcagtgggaccatctcggctcaatgaaacctccgcctcccaggttcaaacgattctcctccctcagcctccaagtagctgggattacaggcaaccaacaccatgcctgaccaatttttgtatttttagtagagacaaggtttcaccatgttggccaggctggtctcaaactcctgacctcaggtgatccaactgcctcggcctctgaaagcactgggattacaggcgcgagccacagagcccagccacaaagtgaccttctaaaaaaaacaaaaaatcctttttgcaagacaaaaagtgctctcatgataatttttttaaatttttttttgagacatggtctcgctgtgtcactcaggctggagtgcagcaggctcaaggcatcctcccacttgagcctcctgagtagctgggactatagtcccacattaccacacccagataatttttgtatttttggtacagatggggttttgccatgttgcctacactggtcttggactcctgggctgaagtgatccacccgcctcagcctcccaaagttctgggattataggcacgagcctccgcgcctggccctaatatttatggtggaaataaggagatgattgcggtacgatttcatgccttccacagtttattgacataaaaagagatttttaaaaaaaacattgacaatgcttaaggaggagaagaataacacgaacacacttcatagaatgcactctgtaggcaaagtacgttaaccgaatagtgagtgagttccaaatttttaaagtcctgttgctcacaggatggaggaaggactatgtgaaaagtaaagtctaattcaaatttgaggtgaactggctgggcgcagtggctcacgcctggaatcccagcactctggaaggccgaggcaggtggatcacctgaggtcaggagtttgagaccagcctgaccaatatggtgaaaacccgtctctgttaaaaatacaaaaattagccgggcatggtggtgggcgcctgtaatcccagctactcgggaggctgagacaggagaattgcttgaatccgggaggtggaggttgccgtgagccgagatcgtgccactgcactctagcctgggtgacagagcgagactccacctcaaaaaaaaaagtaagctgggtggtgcagtggctcacgcctgtaaaacactaacacattggggggccaaggcaggagaatcgcttgagcccaggaattcaagaccagcctgagaaacataggaagaccccatctctacaaaaaatttaaaaatgagtgggcatggtggcatacacctgtagtcccagctagttaggaggctgagacaggagggtggcttgaacccaggaggttgaggttgcagtgagctatgatcctaccactgcctggacaacagagtgaaaccggtctcaaaaacaaaacacaaaaaagcagacagcagcatagaaataggattggacgtggccgggtgcagtggctcacgcctgtaatcccagctctttgggaggccgaggcaggtggatcacttgaggtcaggcgttcgagaccagcctggccaacatggtgaaacctcgtctctatgaaaaatacaaaaattagccggccatgctggcaggcgcctgtaatcctagctaattgggaggccgggacaggagaatggcttgaacccgggaggcggaggttgcagtgagctgagattgtgccacggcattccagcctgggcaacagagtgagactcggtctcaaaaagaaaaaaagaaaaaaaagaccccctctctatgttaaagaatatttttaaaaaaggaagaaagaaaagaaataggattggacaaaatggatctgatctaaaggtcatagactgcaggggtcgggcggacggggaacccagcaaacctgtctctctgcattcctcctggcctctctgagcagccttccctcctgctgggcagagggcagaagcctctctggaatgagggtcatagacctaaaaccaaacaagataggacaggaattcctttatggtcagtgtttacagggaagatggagggaaaattagagtcagagattttaggttttatggcaggatttggggaaaagggattctggtgtctatggctcactttgggaaagacagtttctagtttctatggctagccttgggggagaaggagggtcaggaagaaacttccgcttctgaagctgcttcggaagcctttgttttgaggttatcggtttctgagccccaatattagcctgccacagtctaagctttcaaagcgcctgtcaaactcttgtggatctatgtatttcaaagaccaaaatcaacagctcacatatggggtccaagaggaggggggaggtcactgcacgttgtcacgtgtgagatctttgttgttgttgttgagatggaatctcgctctgtcacccaggctggagtgcagtggcaccatctcagctcgactgtaaccttcacctcccaggttctagcaattatcctgcctcagcctcccaagtatctggaattacgggtgcgtgccatcatgccccgctaattttttttttttttttgtatttttagtagagacgggggtttcaccatgttggccaggccagtctcaaactcctgaccccaagggatctgcccacctcggcctcccaaagtgctgggactacaggcatgagccaccgcgcctggcctcttgtgagatctgataagaagtcacgcactagaaggaagggaagagtgtactccacaaccccaaacgatgcgtttggaatcatttcaaacccacataacaagagtttcatacggaattgggacagaacatggcccctaatgagcccccctaaataattctcaaggaccacttctccaatgacgaaggagattgaggatttttttttcctacgtttattggccgtgtggatattttgcctttgtaaaatatgtgtccaagccttttgcccatttctccagtgggtagtatttcctttgttttttttttttgagacaaagtctcactctgttgcccaggctggagtgcagtggcctgatctcggctcactgcaaaccctgcctcctgggttcatgccagtcttctgcctcagcctcccaagtgctgggactacaggtgcacaccaccacgccctgctaattttttgtatttttagtagagatggggtttcaccatgttagctaggatggtctcaatttcctgacctcgtaatctgcccgcctcggcctcccaaagtgctgggattacaggcgtgagccactgcacctggcctaaaagaatctttaaattgtccatgagcgatggtgcgtgcctgtggtcccagctacttggaggctgagaaggaaggatcccttgagcctgggagtttgaggcagcaatgagctatgctcttaccactgcactccagcctgggtgaaagaggaagaagacccttaataggcggaccacggtggctcacgcctgtaatctcaatactttcagaggcctaggtggaagaattacttgagaccaggagttcaagaccaacctgggcaacatagcgagaccctcatctctccaaaagtttgaaaaagaaaaaaaaaatttttaatgaaacagaagtcgttaattttattttattttctaagacatcttgttatagcaaaaagtccttaattttaatatagtctaatttatatattttcttcattgtaaaaatttttgggtcctatctagcaaatgttagcttacctctatgtaataaagacattcttctgtgttgtcttctaaaacaaaacattgttttattttctgattttaggtctgcagttcatttgtagatttttgtgtctaggattaggtagggttaagatcatttgtggccaggcatggtggctcacaccagtaatcctaacactttgggaggctaaggcaggaggatctcttgagcccaggagtttcagaccagcctggggaacatagaaagaccctgtctctctattttttttttcagttaaatatatacttttaaaaagatcatttgtggtgctatagttgtgggtgtttaatttgtaatttactttgttctgttgatctatctaattttttttttagacggattcttcctctgtcacccaggctggagtgcttcagcctctcaatgccatcatgcccagctaattttttggacttgtagtagagacagagtttcaccatattgaccaggctggtctcgaactcctggccttaggtgacccgcccacctcagcctcccaaaatgctgggattataggcatgagctactgtgtccagccagatctgtctaatttttttttttctttgagacgcagtctcactctgtcactcaggctggagtgcagtggcgtgatcttggctcaatgtaacctccacctcctgggttcaagtgattttcctacctcagcctcctgagtagctgggattacaggtgcgtgccaccacgcctggctaatttttgtatttttagcagagacggggttttgccatgttggccaggctggtctcaaactcctgacttccagtgatccgcccaccttggcctcccaaaatgctaggattacaggtgcgagccactgtgcctggcccagagctgtctaattttaaagaatgtatgaagattcagatttaggttcctgctattatgttatgggaaatcttttcctagtttcttctgattaatataaatccttaattttatttttatttatttttttactacagtcctcttttattactttttatttttcttaattttaatataatgaaaagttcgatttttcctgttatggttagcatttttttcttctgtttaagaggtgtttcctggctgggtgtggtggctcacacctgcaatcctagcactttgggaggccaaggtgggaggatcacttgaacccaggagttcaagaccagcttgggcaacatagtgaaacccttgtctccaatttttttaaattaaaaattaaaaaaggcggggctgggtgtggtggctcacccctgtaatcccagcactttgggacgccgaggcgggtggatcacctaaggtcagcagttcgagaccagcctgaccaacatggagaaaccctgtctctactaaaagtacaaaattagctgggcgtggtggtgcatgtctgtaatcccagctattcgggaggctgaggcaggagaatcgcttgaatccaggaggcggaggttgcagtgacccgagattgcgccattgcactccagcctgggcaacaagagtgaaactctgtctcaaaaaaaataaataaataaaaaataaaataaaaaagaagtgtttccctagcgtgaagacatgaagctcttctgtaaacttcattgttctgcctttacaattcaatctacaacccactagaattaatcttccgtatatatagcatggggtggaggtcaaacaccttttttccatatggatgttcagctgtcccagtgtcatttatttaaaagactgtactggacctggcatggtggctcacgcctgtaatcccagcactttgggaggctgaggcgggtggatcacttgaggtcaggagttcgagaccagcctaaccaacatggcaaaaccccatctctgctaaaaatacaaaattagccaggtttggtggtgcatgcctgtaattccggctacttgggaaactgaggcgggagaatcccttgaacctcataggcagaggttgcaatgagccaagatcgcaccattgcattccagcctgggcaacaagagcgaaactctgtctcaaaaaataagaaaaaatagaggccgagaatggcccttgctgccaccaacatggagactttgtaccgtgtcccgttcttagcgcttgaatgtcccaacctgaagctgaagaagccgccctggctgcacatgccgttggccatgactatgtatgctctggtggtggtgtcttacttcctcatcaccagaggaatcgtttatgatgttacggttgaaccgccaggtgttggctctatgactgatgaacaagggcatcagaggccagtagctttcttggcctacagagtaagtggacaatattattatggaaggacttggatccagcttcctgtttacaatgggaggtttaggtttcataatcctggaccgatcgaatgcaccaaatatcccaaaactcaatagatttcttcttctattcgttggattcgtctgtgtcctattgagtttttttcacggctagagtattcgtgagaatgaaactaccgggctctctgatgggttagagtgcctttaagaagaaatcaggctgggtgcagtggctcacgcctgtaatcccagcactttgggaggccgaggcgagcggattatctgaggtcaggagttcgagatcagcctgggcaacatggtaaaaccccatccctactacaaatacaaaattagccaggcgtggtgacacatgtctgtaatcccagctactcgggaggctgaggcaggagaattgcttgaacccgggaggcagaggatgcggtgagccgagatcgcaccattgcactccagcctggacaacaagagtaaatctccgtctcaccaaaaaaaaaaaaaagaaaaaaaaaaagaaatcagtgcatactggatttgctcctgtcaatgaagttttaaaggctgtccaatcctctaatatgagatgtagaaaagaaggaagagcagcagtaaaagaaatatctagtgaaaaaccaggaagtgtattgaagcttggactagaatttcttctttattaaagagacaaatttatcacagtattttcttttcctgctgaccacattgctataccaatgatgatgagtggcattttcttcttagttttttatttctttaagaaaatacaagccaggcgcggtggctcacttctgtagtcccagcactttgggaggccaaggtgggcagatcacgaggtcaggagttccagaccagcctggccaccatgttgaaaccccatctctactaaaaatacaaaaattagccgggcgtggtggtggcggggcacctgtaatcccagctacttggaaggctgaggcaggagaatcacgtgaacctgggaggcggaggctgcagtgagcctagatcgctgccactgcactccagcctgggcgacagagcgagactctgtttcaaaaaaaaaaaaagaaagaaagaaagaaaagaaaatatactgcatacctacaactataatagcaaatatagtgattattttttacaacccccttaacactttttggagatgacatttctgactttcagaaattaacataaaatcaagaagcaagattccatgagctgagaactctggacagctggtcagctttacctacggagctttggctttaactagagtgtgtgatggtagattatttcagataggtatgtaagactgctgcctgaacaataacatgtatgaaaggaacagaaataaatactaattaaaaaacaaaataagaaaaaataaaaaataaacactactatggacatggtagctcatgcctgtaatcctagcactttgggatgccaaggtgggtggatcgcttgaaccaaggagttcaaggagttgggagaccagtctgggcaacatagcaagaccccatctctaaaaaaaaaaaaaaaaaaagagtactaaagactcagagatagaaaaatggaaattattcatattgtctccagatttttttttttttggacggagacttgctctgtcacccaggctggagtgcagtggcactatcttggctcactgcaacctccacctcccaggttcaagcaattctcctgcctcagcctcccaagtagctgggattacaggcatacgccaccaaacccggctaattttgtacttttagcagagacagggttttgccatgtttgtcaggctggtcttgaacccctgacctcaggtgatccacccgcctcggcctcccaaagtgctgggattacaggtgtgagccaccgcgcccagccagtagtcttttatccttgtaacagattaatcttttctagggaaatggagacctttcattttcatgtcctttttacatccctgttgattgtatctctgcctccattctgttgatcggaatgacactaacttaatttgggttctctaaagcagacactgatacaaaggcttcagttccagaggtttatttagaatgtgatcctaaaccaagagggaggtagcagggagagtaagacaggaaaggatggggagccaacaccttatctaaggacatgttgaggccaggcgtggtggctcatgcctgtaatcccagcactttgggaatccgaggcgagcagatcacaaggtcgggagtttgagaccagcctggccaacatagtgaaactctgtctctactaaaaatgcagaaaacaggccgggtgcggtggctcacgcctgtaatcctagcactttgtgaggccgagacgggcggatcacctgaggttgggagttagagaccagcctgagcaacatggagaaaccctgtctctactaaaaatacaaaaattagccttgcgtggtggtgcatgcttgtaatcccagctacttgggaggctgaggcaggagaatcacttgaacctgggaggcggaggttgcgatgagccgagatcgtgccattgcactccagcctgggcgacaagagtgaaacttcatctcaaaaaaaaaaaaaacaaaaaacagaaaaaattagctgggcctggtggcagacgcctgtggtcctagctactcaggaggcaaaggcaggagaattgcttgaacctgggaggtggagattgcagtgagccgagatcatgccactgcactccagcctgggtgacagagtgagactctatctcaaaaaaaaaaaaaaaaaaggataagttgctgaagtctgtgaagtggacaatgagggcttgattcctttgaagcctgttgaagactgtttacgcttcctcttatcatcccctgcctcatcccctgtcacagagatgaaagactgggacatttctgtgccaaatttcatcccacattgggtgaggctttccctgagacatgttgacttcctgcagttcaaagctactttcttctttagacagggtctcgctctgtcccccaggctagagtgctatagcgtgatctcgcctcactgcaagctccgcctcccgggttcaagccattctcctgcctcagcctccccagtagctgggactacaggcacctgccaccttgcccggctgtttttttgtatttttagtagagacagggtttcaccatgttagccaggatggtctcgatctcctgacctcatgatccgcccaccttggcctcccaaagtgctgacattacaggtgtgagccaccgtacccggcctattttcttctttagacagggtcttcctctgtcccctaggctggagtgcagtggtgtgatcttggctcactgcaacctctgccccctgggttcaagagattctcctgcctcagcctcctgagcagctgggattacagacatgcgtcactatgcccggctaattttttgcattttttggtagagatggggtttcaccatgttggtcaggctggtctcgaactcctggcctcaagtgatctgtctgccttggcctcccaaagtgctgggattacaggtgtgagccaccccgcccggggcaaagctattttccattttaaattttttgttattgttgttttgagaccaagtctcactctgttgcccaggctggagtgcagtggcatgatctctaaattttgtatttttagtagagacgggttttcaccttgttgcccaggctggtctcgaattcctgacctcaggtgatccacttgcctcagccgcccaaagtgctgggattacaggcgtgggccaccatgcccagcctgccaaagctattttctatgggataaatgacagcagaaaggaccccagagcaaaatactacaaagatgtatggcacgtgcatgaggtgagagtatggtagaatcaagtgagtctctgctttcatgagactgaacagtgaggctcaggttaaaattagaggtgtacaagagagtatgatatggacatctgctactgaacaatccttgtgcttcttgaaaatgctcatttccatattttttattttttattttttttcagatacaaggtctcactgtgtcacccaggctagattgcaggggcacaattaaggttcactaaagtcccaaccccccgggttcaagcaatcctcctgcctcagcctctggagtagctgggactgcagttgcatgccacagtgcccggctaatttttttattttttgtagaggcaagggcttgctctgttgcccagattggtcttgaactcctggcctcaaatgatcctcccacccgtgcctcccaaagtgctgggattacaggcataagccactgcacccagcctcatttctatatgtaagttcatttagtcattaagtcttgaagcaaagatccagccacgatctatataaaattttcaatacaggccaggcatggtggctcacgtctataatcccggcactttgggaggctgaggcagactgatcactttaggtcaggagttccagaccagcctggccaacatggtgaaacgctaatacaaaaaattagctgggcatggtggtcagcacctgtaatcccagctgctagggaggttgaggcaggagaatcggttgaacctggaggtagaggttgcagtaagtcaagatcacgccactgcactccaccctgggaaacagagcaagactctgttccaaaaaaaaacaaaaggcaatctttcctagaaaaaaatagtttctgcacattcttaggcacgcatttgtaggctgctatagctatttaaaattttcaatacaatatgtttaccagagcaaactacaatcctcattgttatgtgggccccaaaccattactgatactcatctgtttcccccacgtcgtctacatttcctcatggtgggccagtacttcattttttgtaactcatttgcctgctagggtgactcaggcctttgtttctgagagatctgagtctggtgttgctaggaaggaaaaggttaactagtctataatccattctttctcccaacctggtgatgtctgaggaggcatcccttggtcaaacttctttgtaaacatgctaatcagatctcatggtatttattagaggaaaacaaccagagattcttatctgtgagatgctttcagcaggacatacttgttctttcttgatgtcttgcagtaaacaaggaatttaggggtttatgggcatgagccactggaaaatgtcagcgtcacatatttagttaagagagagagagagaggggctgggcgtggtggttcatgcctacaatcccagcattttgggagactgaggcaggaagatcacttgagcccagaagcgtaagatcagcctaggtaacataatgagacctcgtcttattaagagtctgattctaccctcccttggtgttatctcagttactgtacttttacagggctgtggttgtgcaacttcctgctgggcatggggaattctctgagttccagacaagaaccttcctgcccaatatgcagcagcaacccagtctcttcataatgctcgtggttgattatccatgcccgccaactacctcatttctctgcccagtgctttatcagcctgaagagcccacagtcaccaggcagaaaaccttactgtgcttcttggtgaaagtgttccctcttcaaaaatgaagacatcacgccagataaggtttggggactagaagcacaatttcttcaagtgggtccctagacaggatattgataaatgccaattctgtttcactccctggtagctacacctgtatattctaactactagggtcacagccccttatattgactgttggttatatgcagatattgcatcttagaggacagcaccccaaacccatgggatgttatacctgggctgacactttagttgagccctttaaaaagccattcctgggccaagcccggtggctcacacctgtaatcccagcactttgggaggctgaggcgggcggatcacgaggtcaggagatcgagaccatcctggctaacatggtggaaccctgtatctaccaaaaatacaaaaaaaattagctgggcctggtggcaggcgcctgtagtcccagctattcagaaggctgaggcaggagaatggcgtgaacccaggaggtggaggttgcagtgagctgagactgtgccactgcactccagcctgggcgacagagtgagactctgtctcaaaaaaataaataaataaataaataaataaataaataaaaggccattcctggctgggcatggtggctcacgcctgtaatcccagcactttgggaggccgaggagggcggatcacctgaggttgggagtttgagaccagcctgaccaacatggagaaaccctatttctactaaaaatacaaaattagcctggcatggtggcacatgcctataatcccagctacttgggaggctgaggaaggagaatcgcttgaatccgggaggcagaggttgcagtgagcagagattgcaccattgcactccaacctgggcaacgagagtgaaactccatctcaaaaaaaacaaaaagccattcctggcctggcgcaatggctcacgcctgtaatcccaacactttgggattacgcttgccaaagtaagtgaattacctgaggtcaggagtttgacaccagcctggccaacatggtgaaaccccgtctctactaaaaatacacaattagctggacatgatggcaggcgcctgtaatcccagttactcaggaggctgagggaggagaacctcttgaacccaggaggcaggggttgcagtgagccaagattgcgccattgcactccagccagggcaacaagagtgaaactccgtctcaaaaaataaataaataaataaataaataataaccattatgttatcccatgatggcagctctttctgtataaggtaataaatatgcgatgtaaagagtgtatttcatattaatgcactgattgttgtaccttttttttttttttttttttttttttgagacagggtcttgctctgtcacccaggctggagtgcagtggcgcaatctcgactcacttcaacctctgcctcccaggttcaagcaatccttctgcctcagcctcctgagtagctgggatcacaggtgcccgccaccacgcccagctaatttttgtacttttttagtagagacggggttttgcctgttgcccaggctggtctcaaactcctgacctcaggtgatctgccctccctggcctcccaaagggctgggattacaggcacagggagccaccatgcccagctgtttttttgttttgttttttgttttttttgagacagagtctcactctgtcgcccaggctagagtgcagtggcttgatcttggctcactgcaacctcggttcactgaagcctcccagtttcaagccgtactcttacctcagccttctgagtagttgggattacaggcgtgagccactgtgcccagccttttgttttgtatttttagtagagatggggtttcaccatgttggccaggctggtcttgaactcctggccacaagtgatccacctgccttggcctcccaaagtgctgggattacaaggatgttagaaaatggctgggcctggtggcttacacctactcgggaaactgaggcacgagaatcgcttgaacccgggagacgggcattgcagtgagctgagatcaggccattgcactccagcctgggcgacagtcacaaaaaaaaaaaaaaagaaagaaagaaagaaagaaaacacatcaattccaggaaatacaaatcagatgagatcgggcgtgttcccggtggtatggtcacagaaacaggaagcacaaatcaatcacctccaccactgccctctccgggggaaaggatgaaatgtaatcaacttaccactaactagtcagtcattccccttaaaggacaatagcagatcaaggtgtcatcatgggcttttttttttttttttttgagacagggtctcgctctgtcgcccagcctagagtgcagtggcaccaccatagctcaaccttctgggctcaagcgatcctcctgccttagcctctggagtactaggactataggtgcatgcctccatgcctggctaattgaaaaattttttttgtagagacaggatttggcttttttacccagactcatctcaaactcctggcctcaagcgatcctcccgcctcggcctctcactggtactcttatcacaggcatgagccagcgtgtctggccctgatcacagccagaaactcccaggctgtgataatgagctcagctttcatgagagacagctcatgctattaggcacatccttcgtctcttctcctgctaccctgctaccgcgtctctgttcatgggtgcattatacaagcagtggtctgaggatagagcctcagtgatgcccactgcacaaggcaccctctcttcctggttgctcaggatcttctctgtggtgagcactccctggagaacattaacatgagacacagagatctcatgcctctgcctcttctcataattccttttttttttttgagagggagtctcaccgtgttgcccaggctggagggcaatggtgtgatctcagctcactgcaaccttcaccttccaggttcaagtgattctcctgcctcagcctcccaggtagctggggctacaagtgtgtgtcaccgcacccggctaatttttgtgtctttagtagagacggggtttcaccatgttggccaggctggtctggaactcctgacctcaggtgatctgcctgcctcagcctcccatagtgctgggattacaggtgtgagccactgtgcccagtgcccccccttttttgtgtgtgtcagggtctcactctgtcacccaggctagagtgcaggggcataatctcggctcactgcaacatctgcctccaaggctcaagtggtcctcccacctcagcctcctgagtaacagggactacaggcacgtgccaccaaacccagctaattttttgtatttttggtacagacgagacttcaccatgttgcccaggctggtcacaaactcctgacctcaagcgatccaccagccttggcttcccaaaatgctgggaatacagacgtgagccaccgtgactggccccagctaatttttgtatttttagtagagatgggttttcaccatgttggctaggctggtctcacactcctcacctcaggtgatccacctgcctctgcctcccacagtgctgggattacaggcataagccaccacgccccaccgtgagacccccatctctacaaaaaaagttttaattagctgtgcatggtggcaggcaccctagtcccagctacctactgaggaggctgatcgcttgagcccaggaggtcaaggctgcagtgagctgggatcacagcactgcactccagcctgggagacagagggagactctatctccaaaaagaaaaaaagactagagattgtgccccaggcacagatcatattaatcccagtgatattctgggagtggtggccagactccttcccaggactggtcttccggtttggcaatgagtgttagtcaaggcgtgaggttctcatgggccgtctcaagcactctgttcgacatctttttactctctcccaggctggggtgcagtggcgtcatcttggcttactgtagcctccgcctccagggttcaagcaattctggtgcctcagcctcccgagtagctgggattataggcgcctgccatcacgcctggctaattttttttgtatttctagtagagtcagggtttcactatgttgcccaggctggtcttgaactcctgacctcaggtgatctgcctgcctcgacctcccaaagtgctggggttgactgctcgtggcccctctgttgcacatcttgacttctcagcctccaaggtgattctttaggacaccaatttaatccctctaaacatggcaacagagccagcggtttccagccctatttgcgcagtagaaggattatttacaaatcctcgtacttagactccacccgcagagattcaagtggactgagcctggagtgaagccgaaggcattttcttataatcctgagaatgataatatacagctgtctttgaaaaccaccactaagacttgtaaactttgttcattcaagtcttcttttctccccttaaaagcaggcttatccttgaggtgtgctttttcagactccagtaagcatcactgagaacacttaattaatatactgaggcctctcacaagagggaaggagtggaagaactcctggagaaggacttggaagggagagatgtttttctttctttctttcttttttttttttttggagacagagttcactcttattgcccaggctggagtgcaatggcgtgatcttggctcactgcaacctctgcctcccaggttcaagcaattctcctgcctcagcctccccagtagctgggatcacaggcgcctaccaccatgcccagctaatttttgtacttttttagcagagacgggctgtcgccacgttggcctggctggtctcgaactcctgacctcaggtgatccgcccacctcggcctcccaaagtgctgggagtacagacatgagccaccgtgcccagccaagatgtttttcttaacacaaaaagtttttgtctgggtgtggtggctcacgcctgtactcccagcactttgggaggccgaggcggggagatcacttgcaatcaggagttcgagaccagcctggccaacgtggcaaatacaaaaattacctgggcatggtggcgcttgcctgtaatcccagttatttaggaggctgaggcaggagaattgcttgaatccgggaggcggaggttgcagtgagctgagatcaagccactgaactccagcctgggcgacagagtaagactccatctcaaaaataaaaaaaaatttctaaagcaagcgcttgggctgttctgatgtcaacatacagtagctggccctacctttaacccaggataaggggcaaaagtatacccaaagatacatgtaatcaaagttgctgggtgcagtggcccacgcctataatcccagtgatttgggaggctgaggtgggaggattacttgatcctggaggttgagaccagcctgggtaacacagtgagaccttgtctctgaaacctaaaataaaataaaataaaataccactgtgctctatcctgagcaacagagcaagaccctgtctcaaatataataaaaataaaaataatcagtccttgggtttagcatctttggactaatggtaccagcatgagggaaagcaggtctttgtagctctgataagtgaactttgacacttcttagtgtttttctctaactgtggtgacatacgaataacatataattaaccatttaaaaataagcggttcggtggcatttagtacatcacagtgttgtgcaaccaccacctctaggtagttccaaaactttttctttctgtttttttttttgagacagagtttcgctcttcttgcccgggcaggagggcaatgacacgatctccactcaccgccacctctgcctcccaggttcaaatgattgtcctgcctcagcttcccgagtagctgggattacaggcatgtgccaccgcacccggctaattttgtatttttagtagagatgaggtttctccatgttggccaggctggtctcaaattcctgacctcaggtgatccacccgcctcggcctctcaagtgctgggattacagatgtgagccaccatgcctggccccaaaacactttcctaactctaaaataaagtcccataagcaggtattccccactccctcctcctcccggcctgtccatccacaaatgaatggattaaacaatatggtttatccatacaatggagtataattcagctgtaaaaggggcttggcgcagtggctcacaccagtaatctcagcactttgggaggccgaggcgggcagatcacttgaggccaggagtttgagaccagcctggccaacatggtgaaaccaggtctctactaaaaatacgaaaattagccaggcgtgttagtgcacacctgtaatcccacctactcaggagactgaggcatgagaatcacttgaatttaggaggcagagaagttgcagtgagctgagatcctgccactgcactccagcctgggcaacagagcaagactctgtctcaaaaaaaaaaaaaaaaaagaggaatgagataccgacacattataccatgaggataaaccttgaaaacaacatgctcagtaaaagaagccagcacacaaaaggttacatattatataatgtaattttattttagtttttgaaaagctggtctcctgggctcaagcgatcctcccttcttggcctcccaaactgctgggattacaggtgtgagccactgtgtccggcctatgattttttttttttaatgaaatacctggaaaagataaatccagagaaacagacggcagattacaggctctttttaaattggtttctgacactatcacaagataaaaatgtggtttaaaattgttgcttggtatgtcttattcacctctaaagatatactgttcatcaggccgggtgcagtggctcacacctgtaatcccagcactttgggaggctgaggcgggaggatggcttgaacccaggagttctaggctgtaatgtgctctgccaattgggcatccacactaagttcggcatcaatatggtgacctcccaccaggttgcctaagaagtggggaaatggtctaggttgaaaatggagcaggtcaaaattttcatgctggctgggcacagtggctcacacatgtaatcccagcactttgggaggccaaggcagatggatcacctgaggtcaggagtttgagaccagtctggccaacatggtgaaaccctgtctctactaaaaatacaaaaaaaaaaattagctgggcatggtggcatgtgcctataatcccagctatttgggaggctgaggcaggagagttgcttgaacccaggaggcagaggttgcagtgagccgggatcacgccactgcactctaacctgggcgacagagtgagactccatctcaaaaaaaaaaaaaaaaactttcatgctgatcagtagtggaatcagcttgtgaattgccctccagcctgagcaacacagactgcctcttactaatcccagcactttgggaggctgaggtgggaggatggcttgtgcctaagactttgagactagcctagccaaaatcccttctctacaaaaaatgcaaaaattagctgggtatggtagtgtgcacctgtagtcccagttactcaggaggcttaggtgagaggctcacctaggcccaggaggttaaggctgcattgagctatgattttgccactgcactccaggctgggcctaggcctttgtagtcacagctacttgggggcaaatgtaggaggatcacttgagcccagtaggtcgaggctgcagtcagctgtgttttttgagacatagcaagaccctgtctcaaaaagaaaaaaaaaagtagctacaagctcatttatgcaaaggctaaccactgtcacaagtagagatgtgcagaactgagattcaaatggatggaatggcaagaaaaactgccacttctgtgaacctgaagtcaaactgcccttgtcgtcaagataaaaggtatacatggtgtgagcctgggcatctgaaaggtgttgcagctttttcttttatttttttgagatggagtctcactcctgtcacccaggctggagtgcagtggtgcgatctcagctcactgcaacctctgcctcctgggttcaagcaattctcctgcctcagcctcctgagtagctgggattacaggtgcccaccaccacacccagctaattttcgtatttttagtagagatggggtttcgccatgttggccaggctggtctcgaactcctgacctcaggtgatccgcctgcctcagcctcccaaagtgctgggattacaggtgtgagccacctgtaattagccaggcttggtggtgggtgcctgtaatcccagctactgggaaggctgaggcaggagaattgcttgaacctgagaggcggaggttgctgtgagccgagatcgtgccactgcactccagcctgggtgacagagtgagactccatctctaaataaataaataaataaataaaatgagatgatttctgagtgagttaactaaatcaggatatgcagaacaatgccaagcatatattagccactaaagaatatataagttgcctgaaagcccctttagggtttaaacctggacttcattattcacaatcacattcccggtccccattacggagcctggtcacctgggtgcttgttagatatggaaatcatcagatcccaccccagaccgagtcagaaacgttgagggcaggagttcaagaccagcctggccaacatggcggaaactccgtctctactaaaaatacaaaaattagtcaggagtggtggcacaggcctgtgatctcagctactcgggaggctgagacatgagaatcccttgaacctgggaggcagaggctgcagtgagccaagatggtgtcattgcgctccagcctgggtgacagagtgggactctgtctcaaagaaaaagaaaaaaagaaaagaaattgcagcttctgctcaggaagtctggagtgggccaggattctgcattttaacaactcccaggagtgttagtggggctggtttgtggactcgcctttgagtcgttggtctccgctcaatcaatattagataaaatgacagtattgggagaaatccagggggctctggaggaccgagggatcatattggaggcagatagggcagagaaaggtggaggaggtgggagtcgggtgtggctgtggaggaagctacttaaatccggatttgatctttgctagttcttatccctggacctgaacccaggcgcacatctggattagaagatgccaggctcagaggatcttcgtaaaggtaagccagaaaaaatgagaaccgaagcaaagacacgtgaagaagtggaaagcagctggcggcgggaaaaggcagagggaccaggcggccgaagctggtgcttcgtccacgtgggtggcagggacttcccacagaggctgtcatcgtttttgttgttgttgttttgttttgttttgtttgtcttttgagacagtctcactctgtcgctcaggctggagtgcagtggcacgatttcggctcactgcaacctccacctcccaggttcaagcaattctcctgcctcagcctcccgagtagctgggatgacaggcacacgccaccacacctggctaattttttttttttttgtatttttagtagagccgggggtttcaccatattgaccaggctggtctcgaactcctgaccttgtgatccgtctggctcagcctcccaaagtgctggggtgacaggcgtgagccactgcacccggcccaagttttgtatctttatagagatggggtttcaccatgttagctaggttggtctcaagcccctgacctcatgtgattggctggcctcggcctcccaaagtgctgggattacaggcatgagcctcggtgcccggccgcggctgtcatctgacagcacaggcaaatgcagggaagcctgtttctgccttcaaatccgaaatcttctccctcgtagttgtgtcctaattcttcccaccccgatgcttgttcttgagcacaggggaatctgattcctatgaggatgattaggtcctagatagaatataggcttagccaagctggaaatctcatgttcatgagcacttactagactctggagctgctgccaaaccattttcaggcatgatgcgattcagatcttttagagcgaggcatgcggtggctcatgcctgtaatcccagcactttgggaggccgaggtgggcagatcgcttcagcccaggagttcaagaccagcctgggcaacaaaacaagacgttgtctctacaaaaaatacaaaaattagccgggcatgtcagtgttgtgtagttccagctactcgggaggctgaggtgagaggatcgcttgagcctggggaggttgaggctgaagtgagctgtgatcatgccactgggcaacacagcagtacactgtctcaagaaaaagaaagtaaaaggtgacatccgtgacagcagtgatgttatttttctgcttatttccttgctatattcctaaaagaatatacttaatgaacattgaataaatgataagaataaaaccatgtccatccatttcaccttggattgagttgcctatttctacacaaagaaaatagaacccaagaggtaaggcacaagcgatcccttatttacgtatttatttatttatttatttattattttcttgagacagggtctccctctgtctcaggctggagtgcagtggcataatctcggctcaccacagcctctgcctctgaggttcaagcgattctcctgcctcagcctcccgagtagctgggactacaggcgtgcaccatcacgcccagctaatttttgtacttttagtagagacagggtttcaccatgttagccagaatggtcttgatctcttgacctcatgatccgcccgccttggcctcccaaagtgctgggattacaggcatgagccactgtgcccggccaaatttttgtgtttttaatagagatggggtttcaccatgctggccaggctggtctcaaactcatgacctgatatgatctgcccgccctggcctcccaaagtgctgggattacaggcgtgagcaagggatcccatatttaaatgataacagaaaaaaaggatggaggaaccaagggggaaaggaacaaccttttcctatgaaaatgacaaatgaggcttggaaaaacaaggacaaaaggcagatcaagttgtcctcccgcttcagcctcccacagtactgggactgcagcctgaggcacgaccccggccagcagtgtctccatatctaagaacctcagtcacggccgggcacagtggctcacgcatgtaatcccaacactttgggaggccgaggcgggtggatcacctgaggtcaggagttcgagaccagcctagccaacatggtgaaaccctgtctctgctagaaatacaaaaattatccgggcatggtggcgtgcgcctgtaatcccagctactcgggaggctgaggcaggagaatcgcttgaactcaggaggtggaggttgcagtgagctgagattgtgccactgcactccagcctcggtgacagaacctcagtcacttgatcatcacgttgtacctcagtggaaaggaaaggaaagctcaggcttttgagaatggagttgttagcatttcccatttgtgtctttttcctcctctttcaaggcaaggaccagatgcattcacacaggaaacgaaccatgttcactaagaagcaactggaagatctgaacatcttgttcaatgagaacccatacccaaaccccagccttcagaaagaaatggcctcgaaaatagacatacacccaacagtactgcaggttggaaaatgatccctcttctcactaaactgccttcctgatctaatctaaattcagagtccctctaggataattcctgaggtctcattccaatcgccaatattccccaaacccacactctcctactcacgtccccgtaaacctttcttcaaccccctagagcaagaatgggaaaatttttccagtaaaggaccaggtagtaaataattgaagctttgtgggccataccgtctctctagcaactattttaactatgccaccacagtgcgaaggcagccacagacaacgtaaacaagaggcccatctgtgttcccagaaactcttttactcaggttggagcacggtggtgcaatcacagctcactgcagcctcgacctcccgggctcaagcaatcctaccacctcagcaccccaagtagctgggactacaggtctacaggtgcacactacgcctcccaaagtgttgggattacaagcatgagcccggctgtattttattttttgtagagatggggtttcgctatattgcccaggaggctgatcttgaactcctggtctcaagtgattcacctgccttggcctcccaaagtgtcaggattataggcataagccactgcgcctggcctgaagtttatacaattttcacattacaaaatagtgttgttttgttttgttttaagacagggtgttgctcttgcccacattggagtgcagtggcacgatcatagctcactgcagctttgaattcctgggctgaagccatcctcccactcagattcccaagtaggtgggactacaggtgtgtggtactacagcctcccgagcagctgatactactggtgtgtaccaccaggcccagccaatttgtgtgttttttgtagagatggggtttcgtcatgttgcccaggctggactcaaactcctgaaatcaagtgatccacccacctcagcctcccagagtcctgggattataggcatgagccactgtgcctggccagtagtattcttttattttctctcttttttctttcagtcccaacacacatacaacacaaaatagtactcttattgtgtttgttttttctcaaccattttaaaacgtaaagcctattcttagtgcatgggtgatacaaagacagggggtggtcagatttggccaccagccttagctggctggcctgagccccagagcagcccctgcgactgatccccttgctctcctatcccctgctctgggttttctgacccctgtctcaatttctgtccccaaaatctctcatttctgctccttcctgggagtagattgagtagggttccacaaagaggatgtaagtggccaagctgtggcactagctgttctcacctagaagtactcatattatcaactaaaaggaaaacttgggttgggtatggtggctcatgcctgtaatcccagcagtttgggaggccgaggtgggcggatcatgaggtcaggagttcgagaccagcctggccaatatggtgaaaccctgtctgtactaaaaatacaaaaattagccaggcatagtggtgtgagcctgtagtccccgctactcaggaggctgaggcagaagcatcgcttgaacctgggaggcggaggttgcagtgagccgagatggtgccactgaactccagcctgggcgacaaggtgagactccatctcaaaaataaaataaaataaaataaaaataaataaataaataaatattaggagagtttaagggccaaaaaaaggaaaaaaaaagaaaagttaaaaacttaaaggttaaaaaaaagaatataaataaataaaatacgtttaacaaaataaaaattaaaaagtaaaaattttttaaaaatagaatgacaagtcatctgaattccaccccattctcttctctctcttcccttcaggtctggttcaagaatcacagagcaaaactcaagaaagcgaaatgcaagcatattcatcaaaaacaagaaactccacaaccgccaataccagagggtggggtctccaccagtgtcggcctgagaaatgcagacacactacccagattgcccaacgctgctcacccgatcggcctggtgtacacgggtcatcgagtcccctcattccagctcatcctgtaccccaacctcaaggtccctgcaaatgacttcattggccacagaatagtccattttggctgctgccgagatcctaatatatactgcctctaccccattttggaatcccaagtttgcgctccaagcttccattctggctctcctgcctgttcatctaaccaaagtcgagagagatgataaatacaaaaagtcacatgttgtaatgatgtgtgtgtggtactgtgacatttgcgtttggtcttcgtgcctgtttcctggaaagcagctccagagttccatggagtctccaaagtgccatctttttgtattttgtgtgctaatgttgaccgatagcttcaggatggggactggtctctggaaagaccccagtaggattagagggcaaacttctgggaggggaaggaagctgagggtgaggctgatcaccattggccagtggtttcatcagtcatgtctgggtaaggaagcatccatcaaaacccaggaggacagggtttgaagagatccctgacagctaagcatgcggacgtacctggagggtggcatatccggggagggcatggaagctccgggcccctcgtcatacgcctcatcctagcagggtgcggtggctcatgcctctaatcccagcacgttgggaggccaaggcaggcggatcacctgaggtcaggagtttgggaccagcctggccagcatggcgaagcccatctctactaaaagtacaaaaattagccgggcgtggtggcttgtgcctgtaatcccagctactcgggaggctgaggcaggaggatggcgtgaacccgggaggcagaggttgcagtgagctgaggggattgtgccactgcattccagcctgggtgacagagcaagaatctgtctcaaaaaaaagaaacaagaaagcacagaggaccagctggaatatttggaagaccagaaaatgtccttaaaactcaaaatgcctgggcatataggtcaggtccacctagccttttgaatcaatgcgaacccttcctcaaggcctggaggttggcaacacaaaatcaccctgtggagaacctaaagcattccctctctgagagttgagtcaattgggattccacccccaaaattcctaaaaatctcaagttcctagaaaattctcagaaaaagcaagctctcctatacctccctggctgtactctgatgcaacttggcaaccatcagagaatctccatccccttgaaccttggtcctctgccaatgttcctcacgcctgtaatcccagcactttgggaggctgaggcgggcggatggcttgagcccaggagttcgagaccagcctggccagcatggtaaaacctcatctctaccaaaaacatcaaaattagccagtctcatatactggtctcaaaataaataaatagattaaaatttaaacataaaataaacatgagtgtgttagaaagaacctactggcccggcgtggtggctcacacctgtaatcccagcactttgggaggcagaggcaggcggatcatctgaggttgggagttcgagaccagcccgaccaacatggagaaaccccgtctttactaaaaatacaaaattagccaggcatggtggcgcatgcctgtaatcccagctactggggaggctgaggcaggagaattgcttgaacccgggaaggggaggttgccatgagccgagattgcgccattgcactccaagcctcctgggcaagaagagcaaaactccatctcaaaaaaaaaaaaaaaaaaaaggaacctactgtaggatttggagttgagtaatttcagatagaatcaaaggaagagaaaggtctggattgggtggtgccagcggcagcttctatgactgagtatctcaatacatcttatctataggacggctgactagaaagaggacaaacctataatagataaatgggcggcagccattgcttagccataggcgaatatttgatgggttggggctcaggacaaatgttaaaaacaatcttaataacagcatgccggcccggcggcccacacctgtaatcccaggggatttcagaggtggagggggaggcggaaggattgcttgagcccaggaggttgaggctgcagtgagctgtgattgcaccgctgcactccagcctgggtggcagagcgagcccctatatcaaaacaaacattatcaagaaaaattattaaatgaataacaaaaacaggctgggcacggtggctcacgcctgtaatccaagtactttgggaggctgaggcaggtggattgcttcaactcaggagtttgagaccagcctaggcaacacggtgaaaccctgtccctacaaaaacacaaagaaggagtctcgctttgtcgcccaggctggagtacagtggtgtgatctcggctcactgcaacctcctccatctcctgggttcaagtgattctcctgcctcagcctcccaagtagctgggactacaggcatgcaccagcacacctggctaatttttgtatttttagtagagatggggtttcatcatgttggccaggctggtctcaaactcctgacctcaggtgatccacctgcttcagcctcccaaagtgctggaattacaggcttgagccaccatgcccagcctctacaattaattaaaaaagaaccataaccccaaaacttgtacaaccaccagtccaagaaaccaagtcacaatttctgcagcaatcagccccaaatgcccagggcttgatccatcactcgtagcttccctagtttttgtgcccatcccccaaccttgatttcaatttaggaccaaccagagaaacccaatgtttggctaaacaatcccacaggatcctacttctggttagctccctggcggcctcccaacgtcagcagcctttggtcaggacatatctgaagacttcgttttttttctgctataaagctttctttccttttttttttttctcctgaggtgaagtctaactctgtctcccaggctggaatgtagtggcatgatctcggctcactgcaacctccgcctccctggttcaagcgagtctcacacctcagcctcctgagtagctgagattacaggcatgcaccaccacacctggctaatttttatggtgtttttttttgtttgtttttttgtttctttttgtagagacggggtttcaccatgttgcccaggctggtctcgaactcctaacctcaaatgttctgcccaactcggcctcccaaagtgctgggataacaggcgtgagccactgcgcctggccatggaacctcactctttaaagtgtgcagggaccccagtcattccccactgtgtcgcggttcccataacagtgcctgtcaccaagtatgttttcaaaatacatttttggaagagagagagaaacagaaggggagggggtaggaagagaaagtaggggaagaggaaagtgagagagggagacaggaagggagagggaagggagacacagagatgaagacaaagggaaagagacagaggccgggtacagtggctcatgcctgtaatcccagcactttgggaggccgaggtggcggatcacctgaggtcagcagttccagaccagcctggccaacatggtgaaacccccgtctctaccaaaaatacaaaaattatctgggagtgatggtgtgtgcctgtaatcccagctactcgggaggctgaggcaagagaatcacttgaacctgggaggtggaggttgtggtgagccgagatcgcacccttgaactccatcctgggcaacagaacgaggctctatctcaaaaaaaaaaaaaaaaacagaaagaaaagaaaagaaaaggaacagcttccaagcatctttggagaagggcttcactaacatcaaatcctgtcttcctctcatcaccttctagcccagtatttccccaacgtgagaataataagaatcatctggggagctgttaaaacccagactctgagaccagacaggggcatgcttcccaggtgtgggcatgatttttccctggggttgtatttaacaaagttcaaaacccaggaggtacaatcaaaacctgagccgtctggagactcaagacttcttagggaagacgaaaaagagaaattccggccaggtgcagtggctctcgcccgtaatcccagcactttgggagtccaaggcaggaggatcgcgtgatcccaggagttggagaccagcctggccaacatggtgagaccctcatctctacaaaaaaaaaaaaaaaaaaagagagagagagagaaagaagttcccagagaaagttcccagaggaaacaggagggaaaagggcgaggactgcacccagccagctagggtatgagtgtgaaccatagtctagggggctgggtgtgaattcccagtccaggggctgtgaatacgtggagacaccgatgctggccctgcacccagcctcctccctgggcgaactattgactgaagccacccctcgtgtccccactgttcctggtctcaacttcctcacctgatgaatgggcggggagggtaattcccctacggtggggcttttctcactctgttatgtgttcttacaaaatgtgctctctgatatcatctatatctccctagaaggaatcattagtttatctttttttttttttgtgggacagggtttcactctggtcgcccaggccggagtgcagtggtgcgatctcggctcactgtaacctccacctcctgggttcaagcgattctcccacctcagtctcccaaggcctggtgcggtggcttacgcctgtaatcccagcactttgggaggccaaggtgggcggatcacttggggtcaggagtttgagaccagcctggccaatatggtgaaactccctctttactaataatacaaaaattggccaggcgtggtggcgggcaggtgtaatcccagctactcggaaggctgaggcaggagaattgcttgaacccagaaggcggaggttgcagtgagccgagatcgtgccactgcactccagcctggggacagagtgaaactgtgtctcaaataataataataataataataataataatttaggccaggtgcagtggctcacgcctgtaaacccagcactttgggaggccgaggcgggtggatcacgaggtcaggagttcaagaccagcctggctaacatggtgaaaccccatctcaactaaatatacaaaaaaattagccgggcgtggtggcacatgcctgtaatcccagctacttgggaggctgaagcaggagaatcgcttgaacccaggagggggaggttgcagtgagccaagaccgtgctactgcactccagcctggcaacagagcaagactccgtctcaaataataataataataataatttaaaaaaaaaataaaaaataagaaataaaagaatgaaccacaatgtccctttgttctacaggccactcttgtgctatccacagttgccaaaaacccccacctgccttgtctatggacgcccatcgggtgataccacaaacacctttgatcctacagataccagggtaaattcagcatccaagtccttgaattcttcccgtgagtataagctgccctggctcagccctcttctttgccaggaacccaatccttcaaacttccctcaaagactgggtacttttagcatgactgctctagagattctgggtggggctcaaagtttaaccttcagggtcagcaacattttatggaaagagccacagagtaaatatttgaaacattctcgtacactgacactcagctggactggcaaagcagaatatctgtgtgtcagtgtgcgttttattcagccgttgtttgggtcagggtctgtgggcggcccctggcagctaatgccctcctgtgaggaacaatacctcaccatcaagcacagtccgtcacatattcttgccctggtcgctcgctctttctttcttttctttctcttctttctttcctttctttctcattttcgtttctttctttctttccttcttttctttttctttctgtctctctttatctatttctgtttctttctctctctctcacctttctttctttccttccttccttctttctcttcctttctttctctatctctctttctttctttccttccttctttccttgtttccttctttcttttcttttctttctttttctttctttcttttctttctttctctctctctctttccttttctttctctctctctctctctctttctctctttctttctttctgacagggtcttgctgtgtcacccaggctggaatgccaagatgcactcataggtcactgcagcccaaataaatttccccaggctcaggtgatcctcccacctcacccttccaagtagctaggaccaacaggtacatgccaccatgcacgtctaatttttatttttattttttgagactggtcttgctctgtcacccaggctggaatgcagtggcacgatcacagctcactgcagcctcgacaacccggcccctccaagcaatctcccccctcaccctcccaagtagctgggacctcaggcatgtaccaccatgccctgctaattttttattgtttgtagaggcggggtctccctatgttgcgcagggtggtcttgaacacctggcctcaagcaatcctcctgccttggccacccaaaatgctgggatcatgggcgtgagccactgtgcctggtctggtcttcctcctttcatcctcttagtccttgacctgtccctcttctagagtcctccctcttcatgaccctctcccccttgttggggctcagaaactgatacctctaaatacagcatgttaaaggtgcctcaagggccgggtgcagtggctcatgcctgtaatcccagcactttgggaggccgaggcaggcagatcacttgaggtcaggagttcaaggccagaccgaccaacatgcaaaaccctgtctctactaaaaatatggaaaaagaaaattagttgggtgctgtgacacacgcctgtaatcccagctacttgggaggctgaggcaggagaatctgggaggcggaggttgcagtgagccgaggtcacaccactgcactccagcctgggcaacagagcgagactctgtctcaaaaaataataagaaataaataaatgagcctcaaggtctctgacctcccccgatcatctcttccaaagcacaggcctttatctgtgtaagatccagacctgccaagaggaataattgttttttcttctcctccctgtgagacaaagaatgtaaccacacctgaacagatcccatcactgtcaataggaatgatttccaggacccattcatgctctctagtaatcctttattgccctcaatggaattcctctagccccctcccataatcagtttgccaggagaacatataagcttctgaacccccttgggggatgggcgatcactggctctccccatgctcaggttaaagacatttgtaagccttttctcctgctaatctgcttcctatcagttcttttcagccaaccttcagagagccaaaggcagccttcaccttggcctcaacaccttccatgccttttgcttctcctcctcccctgcaaagcattccccactccttgggttccccactttcaagcatcccaccctccctgttatatgtcatcctcctcattctctgcttttataacccttttaaaattatgggcccagccaggtgcagtgatgcatgcctgtaatcccagctctttgggaggctgaggcaggcagttcacttgagctcaggagtcctacacagctggggcaacatggtgagacccccatctctaccaaattgcaaatattagccgggtgtggtggtgtgagcctgtattcccagctactcaggaggctgaggtaggagaatggtttgaccccaggagatggaagatgtagtgagccaagatcacgacactgcactccagcctgggcaacagagcaagatcgagcctaaaaaaaaaaaaattaggtggggtgcggtggctcacacctgtaatcccagcactttgggaggtcgaggcaggtggaacacctgaggtcaggagtttgagaccagcctggccaacatggcaaaaccccatctctactaaaaatacaaaaaaattagctgagtgtggtggcgggtgcctgtaatcctggctacttgggaggctgaggcaggagaatcacttcaacctgggagccagaagttgcagtgatctgagataatgccattgcactccagcctgggtgatagagtgagactctatgtcaaaaaaaaaatacataaaaaaattaaaaattaaaaatcaatttaaaaaatgccagctagtatacttttcctctctcccttcctttttctatctctctctctttttttttttttttttttttttttttttttttttgagacagtttcactcttgtcgcccaggctggagtgcaatggcgtggggatcttggctcactgcaacctccacctcctacactcaaatgatccttctgccttagcctcctaagtagctgggattacagatacaagcaacaaatcctaattcttgtatttttcgtagaggcagggttttgccatgttctccaggctggtctcaaagcgaatgctggccaggctcatttttttaatttgaattgtgggaaaactgaggctggatcgaatggtcctggacatgccctggaacaaacaacatttagctgtgcaaggcacagtgtcagtgtctggtattggggtgccccagtctcaagtcccaagaaaaagacaaggcagaccatgaattttgtgtggctccaactcagttttcttcatctgttgcttcacttgcagtgccagaccagaatcactttgacctaaaactagctacgataattaacattcagtatgactcattacctaacaaattcaaaatgtaaggaactgtctttagaacttgttctatataaacatgttattaaggtctgctgcggctgttctatgcagctcttttttttttttttctggcgataggatctcactctatcgcccaagctggagagcagtggcatgatcacagctcactgcagcctcaacctcctgggctcaagcaatcctcccacctcagcctcccaaagtgctgggactacaggcgtgcacccctgcacccaactagttttgtattttttgtagagatggagtgtcactatgttgcccaggctggtctccaactcctggcctcaagcaatccaccaactcggcctcccaagtgctgggattacaggcggacgccactgctcccagccccagatttttttctcatttatatttccgcaaacctcaaaaaaacccccaaaggtccctaggtcagtcacttcccactagtaaataagtcagcatctttgcaaagatcaaaggaaaagcaattttccttaccacagagcctcttacaggaaagagagctctgattttccatatgttccccaaccatgctaggatgttcctgtgccctgatggcattcttactaacccattgttccattcctttccagccctccttcctgtaacgtaagtgcaggtgggagttggggattggtccgctaactgggtatagagaaaacagatgggtatgctattctcagtaagggagcttctgtcctgggaaaaatgtggcctctcctaaggaaccctatcccattgaatcaccctgattcactttttttttttttttttttttttttttttgagatggagtcttgctctgttgcctaggctggagtgcaatggtgtgatctcggctcactgcaacctctgtctcccggttctagtgattctcctgcctcagcctcccaagtagctgggactataggcatacaccaccaagcctggctaattttttttttttttttttttttttttgagacggagtcttactctgtgccaggctggagtatagtggcgtgatcccggcccgctggctcactgtaacctccgcctcctggattcaagtgattttcttgcctcagcctcttgaatagctgggactataggcgcccaccaccacacccagctaatttttgtatttttagtagaaacaggttttcaccatgttggccaggatggtctcgatctcttgacctcgtgatccacacgccttggcctcccaaagttctgggattacaggcgtgagccactgcgcccggccctaatttttgtgtttttagtagagatggggttttgccatgttggccaggctggtctggaactcctggccttaggtgatctgcccacattggtcttccaaagtggcgagattacaggcaagagccactgtgccctgcctctcacattttctctcttcccagatttggttcaagaacttaagagctaggccatgtgcggtggctcacgcctgtaatcctagcactttgagaggccaaggcaggcagatcgcttgaactcaagagttccagaccaccctgggcaacatggtgagatccctgactacaaaaattcgccaggtgtggtggcatgtgtctgtagtccctgctattcaggaagctgaggcaggcggatcgcttcagcctgggaggtcaagactgcagtgagctgagatggagacacagcactccagcctgagcgacagagccagaccctgcctcaagaaaacaaaacaaaacgataacactggagagccagagcaggaaccagtctcctctccaatctccaaacctgagagagacatgagtcacactgacggctttgcctgcctgcgatctctctatgtgtgttgattcttgcggaacaaggcgcttcgagcatctcctctgcccctacgcccgtgaccctgtccctcttcttgtctccattgccccccaagcgggtacatttgcccaccttctcacctgggacaccctgggcgtggatctcctcacctgcagcgctaggtgtgctcccagggtctccacatccctaacccccgcaaggctggcctctttacctgcaaagccccccgccgcggcctcctccctctaccataccccaatgccaggctcacttcctgccgcctgcctggaacggggctgctcatgcatcccccacgccctctgaagcccccccggcgcactccacgccctctcgcctgacccctgtttccgctgccggcgtctccacaccccctgacgccgccacgccctggaccgaggtctctagagctgcgcgccggctgcacgtcccttaggagtttccgtgcgccacgaggcgctggcgcgcgtctcccggcccatccaccccgggcccggcgacacctttctttgccacctggaaccaacatcttggttcccttttgagggatcagaacttgtttaattggaatacggcaaaattctgaatttttctgccgtctctattccaacttcagagttctgccgtccagccctgcgacaatcttccggtgccaacgcggcaggtcagtatgtatcccccacgatgccccccgggccacgggcccctagttaacaggtttccctttcgcccgctgcctggaagtatcgccacctcgccccgcccaaccccccaccagacagctctgcagccacagcccctcatccaaccaggaagtccagggcccatctggcccgctagacctcgggaaaccacggcgtcagagcacccattaagaggggtccaggccgggcgcggtggttcgcatcagggcgcccattaagaggggtccaggctgggcacggtggttcccatcagggcgcccattaagaggggtccaggccgggcgcggtggttcgcatcagggcgcccattaagaggggtccaggctgggcacggtggttcccatcagggcgcccattaagaggggtccaggctgggcacggtggttcccatcagggcacccattaagaggggtccaggccgggcgcggtcgttcgcattagagcacccattaagaggggtccaggctgggcacggtggttcccatcagggcgcccattaagaggggtccaggccgggcgcggtggttcgcatcagggcgcccattaagaggggtccaggctgggcacggtggttcccatcagggcgcccattaagaggggtccaggctgggcacggtggttcccatcagggcacccattaagaggggtccaggccgggcgcggtcgttcgcattagagcacccattaagaggggtccaggctgggcacggtggttcccatcagggcgcccattaagaggggtccaggctgggcacggtggttcgcatcagagcacccgttaagaggggtccaggctgggcacggtagttcgcatcggagcaccagttaagagggatgcaggccgggcacggtggctctaatccgagcactttgggaggatcacccgaggtgaggagttcgagaacagcctggccaacgtggtgaaaccccgtctttacggaaaaatacaaaatttatcagggcgtggtggcgggcgcctgtaatcccagctattcgggaggctgaggtgggagaatcggttgaacgcgggaggcggaggttgcagtgagccagtgagccgagattgtgccgctgcacttccagcctgggcggcagagtgggactccgtcttggggaaaaaaagggtagtccaggccgggcgtggtggctcaggcctgcaattccagcactggaggaggccgcggcaggaggatcgcttgagaccaggagttaagagacctgcctgggcaatatagtgagacccctgtgtttgtttgtttgttgagacccttgtgttaaagcaaactaaatatggcctgagaaggactccgtaattctatatttgagtccttgtggatgaactgcaacctaacttaataggtacaaaagattgaaaacctaagttaggccctgcgtggtggctcacgcctgtaatcccagcactttgggaggccgaggcgcgcgaatcacctgaggtcgggactttgagactagcctgaccaacatggagaaaccccgtctcttctaaaaatacgaaattagccagacgtggtgactcatgcctgtaatcccagctactcgggaggccgaggcgggaggatagcttgaacccggaaggcggaggttgcaatgagccgagattgcgccattgcacactctagcctggtcaacaagagcgggaaactccatatcaaaaaaaaaaaaaaggaagcctaacttacgttttatgcgcctgtaaccgccactgagtgttggccaatcccagcagcccagcagctgtacttcatccactcacaggctgctgagcattcaaactgtgttcaaataaggcaaacgctgagcggtaaccaatccagctctttctgtacctcacttccgatttctgtatgtcactttccttttcttgtccataaatttgttctgaccacgaggcacccctggagtccgtctgaatctgccgtgactttcggagctgcccgatttgcaagaggttcattgttcagttgaactcctttacatttatttattttatgtattttattttatttattttatgtattttattttattttatgtattttgttattttattttattttatttattttatttttattttgtttcatttttatttttattttattttatttttattttcatttttttgagacggagtctcgctctgtggcccaggcgggagtgcaatggcaccatctctgcgcactgcaacctccgcctcctaattcaagtgattctcccgcctcagccttacgagtagctggtattacaggtgcccaccaccacacctggttaattttttctgtttttagtagagatggggattcaccacgttggcccggctggtcttgaactcctgacctcaagtgatctgcccacctcagcctcccaaagtgctgggattacaggtgtgagccactgtacctggccccctttaaatttaattcggctgaagtttttcttttaacagatggtgtcagaagcggagtccagagtagagcttctaggaaccttcgggagtgctgagtgaacacgcaaggtgcctgcggaacccacttgtgtccattgacctctccgagtggccggggatcgtgggtaagttccctctcggatttcagagctccacagatttgtgttttgagctctccgagtttcattgagcaaatatctgatccaaactgggtttggaagctgtgacagaaactggactggttctgggaatggatctgatgtggtaattagctggcttggacccagttagaggcctcttacatgtgactgggtcagaaagaaactggtagcaaatggtaatattgcaggaggtgtaaaatttggcttttaaaaattaacagggatgtttgtgttctacccctttgtttcatttttcttgtgcacttaggtattaaaaaaaaaattactgggtaagttaatcaagggaacctgagagtaatgaatgccaatattttaggtaaaaatgggatctttttttttttttttttgagatgaagtctcgtttggtcgcccaggctagagtgcagtggcgcgatctcggctcactgcaagctccacctcccaggttcacgccattctactgcctcagcctccccagtagctgggactacaggcgcccgccaccacgcccggctaattttttttttttgtattttcagtagagacggggtttcactgtgatggccaggatggtcttgatctcctgacctcgtgatctgcccgcctcggcctcccaaagtgctgggattacaggcatgagccaccacgccctgccaaaaatgggatccttaaattctgaaaaactgagttccttctggcttatacattaggcacgggaaggagcaaagacttacagaaatggcaaaatctgcctgagcgtggtggctcacgcctgtaatcccagcactttgggaggctaaggtgggtggatcacctgagctcaggagttcgaaaccagcctggccaacatggtgaaacccatctctactaaaaagacaaaaattagtggggcgtggtagcttgtgcctgtagtcccagctacttatgaggctgaggcacgagaattgcttgaacccaggaggcggagtttgcagtgagtggagattgcaccactgtactccaacctgggtgacagagcgagactctgtctcaaaaaataaaaatggctgggcgcagtggctcacgcctataatcccagcactttagaaggccaaggcaggtggatcacctgaggtcgggagtttgagaccagcctggccaacatggtgaaactctgtctctactaaaaatacaaaaaattagccaggtgtggtggcatgcacctgtaatcccagctacttgggaggctgaggcgggagaatcttgaacccaggaggctgaggttgcagtgagccaaggttgctccattgcactccagcctgggcaacaggagcgaaacactgtctcgaaaataaataaataaataaataaaaattaaaaaattaaaatgagggctcccgaaagttaaatctgctaatctttcagcttcgttactatcctgatccaaaggaagcagactgcagcaccagttggctgactttggataagtaatggggtccattttacctgagtaaagtatgggatggggtcagaggccctcccctcagtaaagtcccccttggttaaaaatgggttaaagatgacagggcccagctggggtcaagtttgagccttgcgagttcagtattgggtgctaagcacagtggccagtgtctgtgttttgtcacgtattttgctttggcgccatgatgaaaaaatgttaattggcttaccccacgcaaccccttcggccacacttgcaaaactaagaggcttttgcttaaggttccataaaacagaaaaagaatttcctttgtgatgccgcaggcttggccctcaggactatagtgtggcaagcagagtcactaggaccacctgggcaaagggaacctagaagcctggcatgctggcaaaaggtaaagtatttcttaccaattagactgtggcccctctgtgcaaactggttagatgaacggtaaaaatcactgtttatctcctctgtaatgctttgattaatacaaaaaagaattctgaggttggtcttaggaagctgtaataaatctggtatgctttgtgtctttctgtattctgtcacgaagaggggtaccttcggatgaaatgcgtgcccagggccgcataagcccgctgttcaagacggcccagcaaactggtcaatcatgtccttggaagcttaacctcctaataccatgtggccctgctttctcttttcacaacggcaggccaggttcagggttccattcccggcttactcagcgagtactttctggtgtcacctttaccatgtgttgattctcttccctctgtttcttatagaacacagaaatattagctgtttggcctagccaaggttgggtaataaaagatttaaaaggactttttaaaacaagcgctatagttaaaactcaggtacattaaaagtggatatttggccaggcatcgtggctcatgcttgtaatcccagtacttggggaggctgaggcaggtggatcacttgaggtcaggaattcaagacaagcctgggcaacatggcataactctatctctactaaaaaaaaaaaattagctgggcatgttggtgcacgcctgtaatcccagctattcaggaaggcgggaaaattgcttgaacccggcaggcggagcttgcagtgagccaagatttcaccactgcgctccggcctgggtgacagagcgagactccgtctcaaaaaataaaaataaaataaaaataaaataaaataaaataaataaaataaaagtgtagtgctcgcttcagcagcacatatactaaaattggaatgctacagagaagattagcatggcccctgcacaaggatgacatgcaaattcatgaagcgttccatattttgtgcatcctggcaagatcatttctgtatctgctaactagcactaaagaaatagtgtgaatctaagcaaaaatgagtggcacccaaaaacaaaattgtggttttcattaaaaaatataaatatttatataataaaatatatatgatatataaaaaataaaatatgtataataaaatatacataatatatataaaataaaaaagtatataaaaaatatatatgtgtgtgtatattcaaattcttttttttttttttgagacggagtttcactcttgtcacccaggctggagtccaatggcacgatctcggcttaccgcaacctccacctcctgggttcaagtgactctcctgcctcagcctcccgagtagttgggattacaggcacctgccaccacgcccagctaatttttgtatccttagtagagacagggtctcgccatgtaggccaggctggtctgaactcctgaccttgggtgatccacccgcctcggcctcccaaagtgctgggattacaggtatgagccaccgtgcccggcaatgtatatattcaaattctaacagcctgggactccttgggaaaaacaggaggcaccagagacgccattttggaaaaaaacctgttttcctcatggaaccacaggaattggaaatggatagattccccttcagaaatctaaggctctgttctttttgggattcaggatctggtataaaaatgggacccttaatttttggagacctgtgttgctttctgctgtgcccacttattatattgggccctagaaactgcatgctttcctggtcctttttgtccaaggactccaccctaaagccagtaatctcaaataaataaataaacacctaaatcaaatattttgaaagaacaataaaaactaatgccttttagttcacataactttagtaatctttgggaaataaaaagttttaaagattattgggaaaaatgaagacatttagtctaaattaggcaggtcagatattaggtttgttcgatgctttaaggtcatcaactgcttcttaggcttttgaaaattgttcagtttacctacttgggagcattagattctagataaggcctgggaacatgtggaattagccatgcactctatctatgcaaaggttataaagaaaagagattttttttttaattaacaaaaaccacaggtggttgtgctccgcctacccagcacagcaggtgagatggtgcaccctcagtggactgaagaggccatgggatcccacctcagccggatagcacgctggccttcaccttcattgtgccatggcagctttcgtgtgagccactgactcgtgtacatgttagactccttggtctataagaaagcatcttgtatggtaaattgttgttctaaagtaaaataactggtttgttcaaaaaggggatgctaaggagaagtcagaaagtcaaagcatgttgtagatggtctgggaaagtcgtgaaagggttcgtgaaaggaaatttaagccaccaaaagtaaaagttgctagttaccattataacatatgattgaaactactgaaaaaatagttttacatggaaagtgtgtgagaagagtgaaacatgtttttggtaaaatatttttaaaaggcaggagaatgtcaaatttcacctagttgagagggttatgtgatttttaaattagataagaataagctcacggtttgaacaagttgtggaaggtttgtaaaaactaatcttgcaaaaaaaattctgtgtgcaaacacgttgactaaatttaaaggggtattttccagttttccataaattaaacattgaaatgaaaggacaaacagggtttctttttttgtttttttgttgcccaggctatgggcaactatgtagctaggcatgttggtgcatgcctgtaatcccagctactcaggaagctgaggcaggaaaattgcttgaacccaagaggcagaggttgcagtgagccaagatcgcaccactgcattccagcctgggtgacagagcaagaccctatctcgaaaaaaaagaaaaaagaaaagcaatagctccctgggtgtcaggtatcagtgagaatgggaagtcaggtcttctctgactcctaggacattcctctctctgtctttgggggttgaattccttgttagaactccatcttgttaaaggggcctcgcacctgcccttgccttctgcagcagccctccttaatcctctccaaacttccatctccagaccaccggattctcctcatgagtgccctgggtggacattggtgaaaggtcactgccttcaggacacaccataggtacagtcaccgaggtaacccagttcaaagaagagcaggatgttcagtatttacaaagggatctagcaattggtccaaaccagtcagtgctggcatgcaccgttcatcgtgccatcagtggcaagatggagatctggcaatgcatggctcacagtaagatacacgccctgtgccattccaccctatcattagaaaaggagtcttctttttctttctttctttcttttttttttttttttggagacagggtctcactctgttgcccaggttgtagtgtaatggtgcaatcttggctcactgcagcctctgcctcctggggtcaagtgatcctctcacctcagcctcctgagtggctgagatcacagatgccagccaccacgcctggctaatatttttgtttgtttgtgttatgttttttgagactgagtcttgctctgttgcacaggctggagtgcaatggcgcaatctcggctcactgcaacctccacctccctggtacaagcaattctcctgtctcagcctctcaagtagctgggattacaggcgcctgccactacgcccgcctaatttttgtatttttagtagagacgaggttttgccatgttggccaggaatggccagacctcaaatgatctgcccgcctaggcttcccaaagcgctgggattacaggtgtgagccactgcacccagccaatttttgtatttttttttttttttttttttgtagagacagggttttgccgtgttgcccaggctgatctcgaactcctgacctcaggtgatcaccttccttggcctcccaaagtgttgggattacaggtgggagccaccatgtccagccgctttttctttttaaaaaaaattttttttgacataacagacaacaccactctcttttatttttttatagagacggggtctcattatgttgaccagtctggtctttttaaattttatttttttgagatggagtctcactctgttgcccaggctggagtgtagtggcgggatcttggctcactgcaacgtctgtaccccagattcaagtgagtctcctgcctcaggcttccaagtagctgggattacaggctcatgccacatcgctggctaattttttttttttgtatgtttttaaattttatcttttaagtagagacagggtttccccatgttggccaggctggtcctgaactcctgacttcaggtgatccaccctcctcaacctcccaaagtgctgggattacaggcatgagccaccatacccagccttcctgctatttttgaactacctgtaccaggctggtttctctgggtgaggggagtggtcaggcagaggcaggccccgtcatggtaagcagctaggagactgctagagattgacagggcactcatgagtgccctgggtggacactggtgaaaggtcactgccttcaggacacaccataggtacagtcaccaaggtaacccagttcaaagtagagcaggatgttgggtatttacaaaggagatctagcaattggtccaaaccagtcagtgctggcatgtaccgttcatcgtgccatcagtggcaagatggagatctggcaatgcatgggctcacagtaagatacacgccctgtgccattccgtagacgtagatcaagcgattattactgcagaaatctccgtggacgtagagcaagcaattattactgcagaaattgcaggagcaggttctgcagcatgtcacatccaaagaagcttcccttgcaagttggtaaccttgagggcttcaataccacacagagttggtctaggtgatggctgaccatccaggcataataatttggggaacaattccaggatggaggttatgttgctagacttgtttgtccgggaaagtggtagacaggaagttcctgtctgcacacgtctcctggctccagccctttcccctgtccatctgtcctacagactccgcctcaggcatgttgtcttggaggacgtgcagaaaggcagccatgcactttctaggtttcgatgccgtcttagagtcactggtcaccaggtctgggtcaaacgggagtctctggctgtcaagactggactgggaggaatcacatcgcttcttcaccatcagctttatctgctttgccttttccgacttcagctttctctgcagggggtatcagtggggttgacaaagattgacatctttttgttatcctcatccctaatcttgccactgacattcttcagtgcctaggcgatgctggcattctccacaaagatgtgggcctgcattttctcatagcgaaactgaatcaggaggaaggggcattgcattgactctgaatcaaattcagcagccacttctcattttatgcagatcttgaactagcagctccctaaggtccgatctggcctgtttccctctgttcttttctctggaggtttttggcgctttctctgtgttaacatgggtttggtcttgtttatggcaagtgcctctccatggctgggtgcggtggctcacgcctgtaatcgcagcactttgggaggccaaggctggcgaatcaccagaggtcagttcgagaccagcctagccaacatggcgaaaccccgtctctactaaaaatataaaaaaattagccaggtatggtggcgggcgcctgtggtcccagctactcaggaggctgaggcaggagaatcgcttgaacccgggaggcggaggttgcagtgagctgaaattgtgccattgcactccagcttgggtgacagagtgagactctgtttaaaaaaaaaaaaagtaagtaaataaataaatgttgatattatgtagccatgttatgtagttttgcatagcctttctctgtcttatagctatgaaagacaatttccaaaacatagcctagaatggagaattgaagataaagtgagaactgttgggcatagtaacctaaaaagggatcccctctggtgtggaaagattgttccaacgcaaaagggactgagatccagagatggcagttgtttgagatctggaatcttcagaagaggtagatcagacttgctcaggaaataatgggtcctaccatcacagcgggtacggatggggctacaagatgagagaggctggataggagagtatttaaggaaaaaaaaaagacagaaaaggaccaaaggacagtctgtgagaccccagagaatgcattaaacctgaagaatttctgaacaatgacgtctgatattcaggcttccgttgtttctttttgtgctgtaatcttccgtgttttctctgcacatagctcagtaaagctctattcaccagttaacctagagtctgtcttgagataagcagggagggctgtgacggctgcacaagggcggagtggtttgtagacctgaaaaggaacttgtaagagctggcagatcttaaccaggagagggagcccctttccacagcctagaagcttctgaagtcatttaaatggaactgaattatatgaagtcaaatgtcagttggggaaaaagtcaaactttattatttatttatttatttgtaattgtgcgtatacatatatatatatatatatatatatatatatatatatatatatataattttttttaaattatgatctccgtgatagtaccaaatcaaactttttttggagacagagtcttgctctgtcacccaggctggagtgcagtggcgtgatctcggctcactgcaacctccgcctcccaggttcaagcaattctcctgcctcagcctcctgaagagctgggattacaggcgcgtgccaccatgcccggctaatttttgtatttttagtagagatagggtttcaccatgttggccaggctggtcttgaactcctgacctcaggtgatccacccgccttggcctcctaaagtgttggaattactggcatgagcgaccacgctggcccaaaccctgctttttactggagagacgaggtagccctaagttaaaaaaaaaaaaaaaaagaccctgtttcacttcttttggatatacccggggtgacattgctagatcattctgcaattcctccttttttttttttttttttttgctgggggtgggatagagtctcactcccaggctggagtgcaatggtgtgatcttggctcactgcaacctccgcctcctgggctcaaacgactctcctgcagtgaggagctgggattacaggtgcctgccaccacaacctgctaattttttttttattttttgtatttttagtacagacggggtttcactatgttggccaggctggtcttgaactcctgaccccgtgatccgcccgccacagcctctcaaagtgctgggatgacaggcatgagcctccgcgcccagtagatcattctgtaattctgtgtttaactttttcccccctaaacttaactgaagtgatatttaactttctgaggaatcaccaaatcaaaggtgacttttgagacaaatacaggaagtggaggtggttttcctcatgtagatgaagacattctaaacccagaactgaaaacacacatggaatccttttaagtatcaggatgccttggtggacaaaatggatacatccaacttctcaaggagcttaatattcagtattaaagctgaggtgagctcaggtgattcacgcctgtaatcccaacattttgggaggccaaggcaggcggatcacttgagcccaggagtttaagaccagcctgggcaacatagtgagacccctcccccctgcccccgtctctacaaaaaataaaaaaattacagacgcatggtgtagtcccagctacttggcagtcaaaggtagaaggactgtttgaacccaggagtgggttgaagctgcagtgagccttgattgtaccagtaaactttagcttgggaggcagttgagaccctgtctcaaaaaaaaaaagaaaggaagaatttctctctcccaacttcccttggtttctcctcgccccccggctaaaaagtgattggggaccttttaaaaaacttcctgctctccacagaatgggattacagccccgagatgatccataaaagattttcaggaagaatgaagagtttagggagtgaaggttctaaaacagtaaatagagtgtcacaaagaaatccattcatctctttgaaggctgggtatttggaaaaagagagaaagaaagcttcattcagagagcgctcgcctgtatttaggggtgtttggagggggcggggtgactatagaattagggtaaagttcagtgtcttgcaaatcagccctgaaatagccctgatccctgcaggcctgtctggtttcccaaaccctccactagctttcaaatttgcattaaaaagcttttggcttgttcattctgttctttctttcttttctttcttttatttatttattttttttgagacggagtctggcactgtcacccagactggagtgcaatggcgcgatctccgctcactgcagcctctacctcccgggttcaagcaattctcctgcctcagcctcccgagtagctgggattacaggcgcccaccgccacacctggcttatttttttaatttttaatagagatggggtttctccatgttggccaagctgttctcaaacttctgacctggtgatccacctgcctcagcctcccaaagtgctgggattacaggcgtgagccactgcgccaggccctcattctgttacttctttctttcttttttcattaatttaagttctgggatacacatgcgggatgtgcaggtttgctacataggtaaatgcgtgccgtggtggtttgctgaacctattgacctaggtattaagcctcacagccattagctatttgtcctgatgcccttctgcctcctgcccattctttgttatttcttcatattccaattaatgttcattttgaggacctggctctggccaggcaaggttccagtctggagtcaaactgaggaaagtattacctttcacaaacacttagaccacgttgggaggggagaatgattgtcctccacatgcgtatgggtgtgttataaaccccaggaaggtaaatactaagcaaaggcgtgcacagataattattgcaactgatgattccacgtcaattgtactgtactgtgagtaggtttataggctgccgtgacaggggccatcacctgggtacgagggtgctggcttcctcttgaagacgtgactttaaaattgtgagttgaatagatgcaaggatattggcccagtggaggaactttgaggggagggggcagggtatcctggttgggaggaaattacatacagaaattggggagtggtgacaacattgactcttccagtaattgtctgggtgtggtaactcaggactgtaatcccagcactttgggaggctgagatgggaggattgcttgagcttgggagttccagatcagcctaggtaacacgaggagatctaaaattgaaaaaaaacgtagctgggtgtggtggctcattcctataatcccaacaactttgactcaggaggctgaagtgggaggatcccttaaggtcaggaggttgaggctgaagtgagctagcactttgggaggccgaggtatgtggattacttgaggccaggagttcgagaccaggctggctaacatggtgaaaccccatctctactaaaaataaaaaaattagccaggcatggtggtgcgcgcctgtaatcccagtgactcgggaggctgaggcaggtgaatcacttgacccctggaggcagaggctgcagtgagccaagatcataccactgcactctagcctggacaaccagagtgaaactctgtctcaaaaaaacaataataattttaaaaaaattttttaaataaaaaaattaacaaatgacccgcacatctggggtgaagtaagacgaggctggcagcatagctctgtcacctgtggttaggattaattaagctcagctttaaaggctggatcttggcctcctgggttttaattttgacttctccacttctcagccatgttttgttttgttttgtttgcttgaggagggacaaatcaggccagcattgagcctctttcccccgtgtgtcaactgagattgataattacaagattaaatgatgcttgtctgtgattttagcatctgttcagcccatcattcatttcaagagtattgactgggcttcagggtaggttccatgttagtactggggacgccgtgggtgggagggagactgggtctccaccctcctagagttatagtctaggcctgcggttaagcagatttttgtgcaggaatcaaacccactacactacctgtcagaaatcaagccctgttccaggcactgggaaactcagaatttaaaggggatgtaccaggtctctgtccttgcggagcattatcgatcagtagaagagagaaaataaacaagcaaacacctgagacaattgtaatagcaataatgtgatatcaataaaatgaaacagagcaacagaaatagggtagatgggccgggcgcggtggctcacccctgtaatcccagcactttgggaggccgaggtgggcggatcacgaggtcaggagatcgagaccatcctggctaacacggtgaaaccccgtctctactaaaaatacaaaacattagccgggcgtggtggcgggcgcccgtagtcccagctactcgggaggctgaggcaggagaatggcgtgaagccgggaggcggagcttgcagtgagccgagatggcgccactgcactcaagcctgggcaacagagtgagactgtctcaacaaaaaaagaaaagaaaagaaacagagtagatggtcttagaaatgacaaggaatcccaatgagaggttctacctgggacaaaatagaaaaatgggaaatcataataagctctggaattggggcagtggtattgtttatttcctagttgtggcaaatctaatgtaaaatatggacattaaagaaaactgggtggagaacatagagaactttctgtactttttgcaacttttctgtaagtctaaatttattcgaaggccgggcgcagaggctcctgcctgtaatcccaaaacgttaggaggctgaagcaggtagatcacttgagcttggtagtttgagaccagcctgggcaaaaaagtgagacttcatctccattaaaaatttaaaaaattagctggctttgctggtgagcacctgcaccagactggttagcctgggcagcatagtgagaccccgtttctataaataagataaaaatcagctgggtgccaggcgtgatggctcatgcctgtaatcccagtgcttcgggaggccgaggggggcggatcacctgaggtcgagagtttgagaccagcctgaccaacatggagaaaccccgtctctactaaaagtacaaaaattagctgggcgtggtggcacgcgcctgtaattccaggtactagggaggctgaggcaggagaatcacttgaacctgggaggcggaggttgcagtgagctgagatcactccactgccccccagcatggctacagagcaagactccgtagcgggatattgcatgcatgtaatcccagctactctggagactgaggcaggagaatcatttgaacctggggggcggaggtcacagtgagccaagatcatgctattccagcctgggtgacagagtgagactacctctcaaaaaaaaaaaaaagaaaaagaaaaagaaaaagaaatgcatttacagaagctaggaaaatcaaattcagggaggaggctggagggcaaagagtgggtgtggccagactttaatccattctccatctgtggggtggtccctagggtataaaagagctccagggcccctgccctgcctttcatcctcaggatgggaagtcctcacagagttcagtaagtattggcttcccatggtgtttctgcacttcccccggggtcatatgagcctcacatttaggttgtaagactccccctaaaatctccaacactgagtcctctctatttgtagtcatgactccgacaccttgattctctgcccctaatactctttttttttttttgagacggagtttcactcttgttgcccaggctgcagtgcagtggtgtgatcttggctcactgcaacctctgcctcccggattcaagcaattctcctgcctcagcctcccgagtagctgggattacaggcatgcaccaccatgcccagttgattgtttttgtatttttagtagaggtggggtttcaccatgttggccaggtctcagactccaagcctcgagtcatccgccctcttcagcctcccaaagtgctgggtttacaggtgtgagccaccattcctggaccgcattattgattttttaaaatttttggattttgttcaattagtgattgagtctcactgtgttgcccagatgggcttgtctcccaggctggagtgcagtggtgagatcgtgactcacagtagcctcaacctccctcaccccagcgtcccgtgtagttgggatggcaggcatacaggaccatgcttagctaatttttttttttttttgtagggttggggtctcccaccattgtctaggctggtcatcaacacctgggcacaaacatcctctcaccccggcctctgagccactgcacccagtaggttttaggttcattttattttttatttaggtgtccacaaaggcagctttttccttttctttattttttaaagagacagggtctcactctgttgcccagggtggagtgcagtggccagatcttggctctctgcaacctctgccttccagactcaagtgatccaccttcgtctccagagtagctgggactataggtgtgcacaaacacacccagctgagttttaaatcttttgtagagaagggggcctcagtatgtttcccaggctggttttgaagtcctgtgctcaagcaatccttctgccttggcttcccaaactgctaggattacaggtgagccaccacaccgggcctgtccacgtaatttaaaaggtgctggacgtgtgcggtggctcacgtctgtaatcccagcactttgggaggctgaggtgggcggatcacgaggtcaggagttcgagaccagcctggccaatatggtgaaaccctgtctctactaaaaatacaaaaattagccaggtgtggtggcaggcgcctgtaatcccagcttctcaggaggctgaggcaggagaattgcttgaacccaggaggcggaggctgcagtgagctgatgatcgctccatggcactccagcctgggcaacagagcaagactaagaaaaaaaaagaaagaaaaagaaaaagaaaacaaagtaatgtaaaaggtgttattcaggctggggacccccaaagtgctgggattacaggcatgagccccagggcaggcctaggatttgcattacaaggctctgcattgttcctgagaactggagagagtgctcaatctacctttcgctattgagcaacattcagaagtcagttttaaatctcttatcttctgcatagaggatgtgcctgcagtttccaggtactggacaatacagggagggtacttctcagtctgtggcactcagccttgagggcactttctggtgccagaatgaaagtgctgtcatagctgaggtccaatgactgaggcgagcaccgaagaaacaccatgggggggagggggggcggggggctccaggagccactgcaggtaaaagctaaaccgtggtgcttgttctgcgccataaactggacttcagcccagctttaaggaaatgaccacggtctctgggttgtgaggctgggttccgtagcagctataatgcttggattcagggatagcctgggtcacaccattgccagagaagaggcaaccaatccagaccccaaaagcgggttcttggatctcttgctggaaagaatttcgaggcaagtcacaacacagcgaaagaagcaagctgaggcctgggctcaatcctcctgcttcgtcctcccaaagtgctgggattacacgcatgatcccctgtgccctgccaatatttggtaattataactggtggtcagcttacaatgtggctatttccagaccataagtaccaactctataggtgccttgtgagtgagtgccttgctacttcaagcagttactttcgtgtgttattaaaccagaggcctgctaagcctctgtgcctagtaaagattacaatttggaatgtcagcccccagctgtcctgtgtgattggcaggttaggtccttgttgaaccagaagcaactggccagtcgtacagatgcaactttcggaccagtagaaaatttctatgtcaacctggagacatagggattgtacctttctgataccctattagtaaataaatagtatttatttataaattatgtataatagtatttatctgaatatatcccaagcagcccaagtgtgttccagacataacatttttatttacatttaaatatcactaagattagagatacacatctaactcaggttttcaactagtcttaccattgaaagaactattgtggcaggacgcagtggcgcacgcctattatcctagcactttgggaggccgaggagggcggatcacaaggccaggagttcgagaccagcctggccagcatggtgaaaccccatctctactaaaaatacaaaaaaattagctgggcatgatggcacaggcttgcagtcccagctactcggtaggctgaggcaggagaactgcttgaacccggcagacggaggttgcagtgagccgagatcgcgccaccgaactccagtctgggcaacagagcaagacgcttgtcttaaaaaagagagagaaagaactacttgttctctgtaagccatgctggtttagccaaaatgctgcagttgtgtatggccagggacgttgaggctgcagtgagccgacggctgtgttgccgctctgcagtctgggggacagagcaagaacctgtctcaaaaaaacaagaagttagtgagacagacatgccgttctgttacttttccccttgctggttcaaagctaggtagttgccaattaaatgtaatcttgtagagcaaaaatgtttttcattttttgagacaggatctcactctattgcccagcctggagtgcagttgtgggaactcacagcaacctccacctcctgggtttaggcagttcttctgcatcagtctcccgagtagctgagactacaccggtgcccagagggcagtggccagatcttggctctctgcaacctctgccttccagattcaagtgagccacctccgcctcctgagtagctgggactataagtacgtaccaccatacccagttaatttttgcattttttgtagataagggggctaagtatgtttcccaggctggtttcgaagtcctgtgctcaagcaatccttctgccttggcttcccaaactgctaggattacaggtgagccaccacaccgggcctgtccacgtaatttaaaaggtgctggacgtgtgcggtggctcacgtctgtaatcccagcactttgggaggctgaggtgggcggatcatgaggtcgggagttcgagaccagcctggccaatatggtgaaaccctgtctctactaaaaatacaaaaattagccaggtgtggtggcaggcgcctgtaatcccagtttctcaggaggctgaggcaggagaattgcttgaacccaggaggcggaggctgcagtgagctgatgatcgcgccatggcactccagcctgggcaacagagcaagactaagaaaaaaaaaagagaaaaagaaaaagaaaacaaagtaatttaaaaggtgttattcaggctggggatccccaaagtgctgggattacaggcatgagccccagggcaggcctaggatttgcattacaaggctctgcattgttcctgagaactggagagaatgctcaatctacctttcactattgagcaacattcagaagtcagttttaaatctcttatcttctgcatagaggatgtgcctgcagtttccaggtactggacaatacagggagggtacttctcagtctgtggcactcagccttgagggcactttctggtgccagaatgaaagtgctgtcatagctgaggtccaatgactgaggcgagcaccgaaaaaacaccatgggggggagggggggcggggggctccaggagccactgcaggtaaaagctaaaccgtggtgcttgttctgcgccataaactggacttcagcccagctttaaggaaatgaccagggtctctgggttgtgaggctgggttccgtagcagctataatgcttggattcagggatagcctgggtcacaccattgccagagaagaggcaaccaatccagaccccaaaagcgggttcttggatctcttgctggaaagaatttcgaggcaagtcacaacacaatgaaagaagcaagctgaggccgggcgcggtggctcacgcctgtaatcccagcactttgggaggctgaggtggatggatcacctgagatcactatttttctttttattttctgagatggagtttcactcttgttgcccaggctagagtgcaatggcacgatctcggctcacagcaacctctgcctcccgggttcaagccattctcctgcctcagcctccggagtagctgggattactggcatgcgccaccacgcccagctaattttgtatttttagtagagacggggtttctccatgttggtcagactggtctccaactcccaacctcaggtgatccgcccgtctcggcctcacaaagtgctaggattacaggcgtgagccaccgcacccagcctgttttctgcatttttagtagagacagagtttcactatgttggccaggctggtctcaaactcccgaccttgtgatctgcccgcctcggattcccaaagtgctgggattacaggcgtgagccaccgcgcccggccttatttttctttttttttttttgagacaggatcccactctattgcccagcctggagtgcagtgcagtgatctcagctcactgcaacctctgcctcccgggttcaagcaattctcctgcatcagccgcccaagtagctgagattacagccgtgcctggcttatgttttgtgtttttagtggagatggggtgccaccatgctggccaggctggtcttaaactcctgacctcagttgatcctcccacctcagtctcccaaagtgctgggattacaggtgtgagccaccgcgcccagcaagcataagattttttgacacatggaggatcacttgctggatgtgcactgagaagtaatgtgcccatttcccagccacactctcccaaaggcttttacaggcgctgtccccgtgaggtggtagaacagaatgtcagaattcaacacattccaacactgtcttctgttgagctgtaggaggactgcctgtggagggacatgggttctatgctaccttgcaggttttccctggggcttgtgatcactgtctccttggtgacatgcaatctgggagtgctttctggagtctgataagaacatactggcacattgcctgtgacgtgtgggacccaggcattttcagtgctgaggtgagtccttgattgtaactgatggggactggtatcttaactccaggttactgaagactaggaatttcttgccttacagtaaaattgcaaagaagagtagcataagaggtagatcagaagactgcagaatagattaacaaatgaatgcccaaatgaggatgctaaacttggatttgcatcaagaagacagatattggtcgggcgtggtggctcacgcctgtaatcccagcactttgggaggctgaggcgggtggatcatcctggctaacacggtgaaaccccgtctctactaaaaaaatacaaaaaaattagccgggcgtggtggcaggcgcctgtagtcccagctgctggggaggctgaggcaggagaatggcatgaacccaggaggcggagcttgtagtgagccgagatcgtgccactgcacttcaccctgggcgacagagcgagactctgtctcaaaaaaaaaaaggacaggtattaggatagttttgaagcccacttgctcctatcatggcattgaagcatcagtttgctgccaatcactccttcttctgtgttcatagacaggactgtggaaatgtacacttggattctttcacaggtaatgctgagaaatttaaaaccaaaaacggccgggtgccgtggctcctgcctgtaattctagcactttgggaggctgaggcgggcggatcacaaggtcaggagttcgagagcagcctggccaatatggtgaaaccccatctccactaaaaatacaaaaattagcctggcatagtggcgggcccctgaagtcccagctactcaggagactgagtagacgaggagaatggcttgaacatggggtgcagaggttgcagtgagctgagatcgcaccgctgcactccagcctgggcaacaagagtgaaactctgtctcaaaaaaaaaaaaaaatttgaaattaaagtgtatgattagagtgcatgattggttctgactggatgtgtaacatgtgcatagccttctcataaatcaaaggtttttatgtgaaacctaccactagtgatgtaactgaatttgtgtaaatgctggtgtgtctgccttttcctagcaactccctgggcagcctgaggattctttgaggttattttttttcaagatctggctgggagcttctgcatgagtgctgtgtgaacgtcctccatctgcagtgtgaggacagcgaaccctagtgtgagttaaccacgtaggaagagtttgaagtcagacatgacattcagactgaggtcctcaaaactgaggggcattttctgtggtttgaaaggaaagtgcacccagttttggggatgtcaattgtgaatcctcatcataacccatccccagtcccccatcgcattgcaccacatggatgcacccagtggactggcctttgcttttctattgtttctttttctctccactgcaatcagctttctcacgttgaatgcattccattttctaagcgctctcctaggcaaaaatccctctaatgcaaagcaaaaatgtctgttatgcaacattgttctgagaccccaggaattgcagttaacttggctccttagtatgtgcttcctaaggcgggtggggtggctcgcgcctgtagtcccagcactttgggaggcaggcgaggcacttgaaaccctgtctctactaaaaatacaaaaattagctggacatggtggcatgtgcctgtaatcccagctacttgggaggtgcagacaggagcatcgcttgaacccaggaggcagaggttgcagtgagccaagataatggcactgtactgcaacctgggtgacagagcgagactcaaaaaaaaaaaaaagtgcttcctgtgaaggtttcctttcccttctgccccccataccagtccatctatttagtagatgtcctggtttctacccaggatatcatggaccaggggttctgtcttccagccttgagtacaatggtgcgactatagctcactgcagtctcaacctcctgggctcaagtgatcatcctgcctcagcctccaagtagctggtattacagatgcacgtgcccccattcccagaggttcttaaatttatgacaaaaacccagaagcttggctgaagcagcttgttggggcccacccacagattttgtttggtgccatagacctgggttgggatctggggagccatttttcttagtctcaatgtaaatgtctaagcattttctttttttctttctttttttttttttgagacagggtttcgctcttgttgcctaaactggagtgcagtggcacaatctcggctcactgcaacctctgcctcctgggttcaagtgattctcctgcctcagcctcccaagtagctgggattacaggtgtgcaccaccatgcccggctaatttttttttatttttttattttttttattttttgagatggagtcttgctctgttgcccaggctggagtgcagtggtgtgatctcggatcactgcaagctccgcctccttgattcatgccattctcctgcctcagcctcccgactagctgggactacaggtgcccgccaccacgcccagctaatttttttgtatttttagtagagacggggtttcactgtgttagccagggtggtctcggtctcctgatctcgtgatctgcctgcctcggcctcccaaagtgctgggattacaggcttgagtcactgcccctggccaattttttgtatttttagtagaaatggagtttcaccatgtttcctgcctatctctctatgtatttagacagggtctcactatgttgcccaggttggtctcaaactcctggactcaagcaatcctcctgcctccaccttccaaagtgctgggactacaggcttgagccatcctgcctgaccatttgagagttttttttttttgagatggagtctctctctgtcacccatgctgtagtgcagtagtgtgatcttgcctcactgcgacctctgcctcccgggttcaagcaattctcctgcctcagcatccccagtagctgggattacaggcgcccgccactacacccagctaatttttgtatttttagtagagacagggtttcaccatgttggccaggctggtctcgaactcctgacctcaggtggtctgcccacctccgcctcgcaaagtgctgggataagaggcgtgagccaccgtgcctgtcttcaacaatgatttctaattgcattttatggtggtgattgaacataatgtactttggtccttctccattgtatgcctcgtgtattatgtgtctcataacgtctgtcccgtcctatgctatgtgtgcatttgaatgttggggagggttcagtagatgtccattgagttggtttgcaaacttatttgaaacttctacttacttctgcctaattctgcttattattgagagtggactgctctgggatgccttttgtttgcactctgatttcagatggaccctgagaatgctcaagccccaaaccctccttgggaagtgaagctcaggctgtgatttcaagccagggggcgtttttctataactggatgaaaagcacctccagagcttgaagctcacagtttgagagcaatcgtctaaggaagttgatggcaatgttaatagttttttaaacaagcatgaaatcagattcctgtgtttacttctggatgctgttgatccaggaaatgtacttagaaaattcattttaacggaaatagtcataagcgtcttggtaatttcatgaagctacagtgagtaaattgcctgagaatttccctgcctgaaaggtcttcaggagtgtaatttttttttaatatagcttatttaatacaaatagagatgcggtctcactcttgcctagactggtgtgcagtgtcatgttcacagctcactgcagcctctcaacctccggggctcaagcatcctcctgcctcagcctcccaaagtgctggaattacaggtgtcagccaccactccctactcatacttgtatatttctctttaaattctgttgaggttttatggcctagcctgtggtctatcctggagaatatttgtgtgcatgacaatgtgtatatatatatatatatatatatttttttttttttttcttttttttgagatggagtttcactcttgttgccctagctggagtacagtggcatgaatctcagctcactgcaacctccgcctcccgggttcaagcgattttcctgcctcagcctcccgagtagccgggattaccctccaccacacccggctaatttttgtatttttagtagaggtggggtttcgccatattgaccaaggtggtcttgaactcctgacctcaggagtcccgcctcggcctctcaaagtgctgagattacaggcgtgagctaccctgcccaggctgaccatgtatattcctaatttttgtacttttttttttttgagacggagattcactcttgtggcccaagctggagtgcaatggcatgatctcggctcactgcaacctctgcctcctgggttcaagcaattctcctgcctcggcctcccgagtagctgggattacaggtgtgcaccaccacgcctgactgacaatatatattcttaaacagctcagattccattttggatcctcccatcaggactggaacttaggtgtactggaacttaggtgaacacttggctcaaaattcattgctgttctctataaatctagccagttctcttggttaaatttaaggtatgtatagtagtcgctgctttttctttcgggggacaaaactcaggaggattgcttcttgattcataagggcaacctgttgagattttcacgcaaggaacccgagatgttcatttaatgggcttataatttgggattccagaacacatgcaaacagggcaaatgaatgtttggctgtatctttatttttgtgttcatttcagcctggtcaaggttttagaatccaaggaaaccaataaacacccagagtgctggagcaagactgtctcctgctgtgaccctcaagatggaagcagtttctgttgtctgaaaggaaagaaagtgcttcctttttgagggttactgtttgagaaaagcaaccttgaggttgatgctgatgtttgtaacacacctgcagagtatacttataatcagacttgggtgatgtgaggttttgtttttactccaagatgagggtctccacccaggctggaatgcagttgcccttccaacctagaactcctgggatgaactggtcctctatgcctcagcctgccgagtagctgggactataatataggggtgtgccgccatatttggtagatttttcaattttttgtagagatggggcctcaccctggccaggatggtctcaactcctgagctcaagcaatcctacaggtgtgagccaccgtgcccattttaaagatagttgacatgatcaagcatagtgggacacacagccccagctactgcagaggctggggtgggagagtctcttgatttcaatgctataccgtgcactaatgacacctttgaatagccactgcactccagcctgggccaacatagcaagatcccatctcttaaaaaaaaatacattacatggcacctggttccagagacaccatttgtgttggtcaaacaatggcctcctataaatttagtttaatgaatccaaaccatgtttccttcattaagagagtaaataagcctccaagtctatccagtctttttgagacagagcttggctcttgtcactcaggctagagtgcaatggtgcaatctcagctcactgcaacctctgcctcctgagttcaaggagttctctcacctcagcctcccaagtagctagaatgacaggcgcctgccaccatgaccagctaatttttgtgtttttactagagatggggtttcaccatgtcggtcaggctggtctcgaactcctgacctccgtgatccacccacctcagcctcccaaagtgccgggattacagacgagagccaccacgcccggcctgtccagtcttgttctgcagtccccaatggggattttttttttcctgttcatttgtctttttattttaatctacttgtccctgacactgaaaatttttccttcctaacagcttaccatcatttctcagaatagacctgcttcctctgtgagaagcttatagttgattcaaccctcaaccactaatgccaacaaccctagtgagttcttttgactacagctggaccatttatcctgtttcctgtgggtagcggttccaatgtaccattccaacaggcaaaacctcgcctctgaatacaggttgcttggcaagatctaaaatgtttgctgtgcctaatataaactattgtaaagaaaatccatctcaatcacagtgacaaatgtcacatgagacaaaaccacagatattttcgcaaaaatagggtcctttagaaccctagaagggtctctctagtaacaggtgggatgttcagcagctcttgttgttgccacagtgagcgatgcctgttcgtccagcccttaacacctcttactccatggaagttctgcctgcactgctttatagaacacctcttgggttgaggtagagttggaggggacctcagtgtcccttgctgatgggatgtgcactgcttagcaagcgcacggaggtggagtgcatgggctctgagtttttattgggtaaatgcagccgaaatgtagtgtgcatgaacaggtcaaaaaattgcacatttgatttaatttttaaattttagagatgggggtctcactgtgtcacccagactaaactgggctgtgctcctatgcgtaccctagtagctgggacttcaggtgaatattaacccatgcataggcaaggagagaggaaggctctgacagtctgtgatctcccctcactgcaacctccaccctctggactgggaacgtcagggcactgcaccgatgcaggcaggatgagccgaggggaaaggagagccaggcatcactggctggggacattttgggtttgatctggatggagcaggtgtctcctggagagagagcccctgggattttcactctgctccctggctgtcttagtcatggaatctgacaacagagactcctgcccagggccacttcatttggtttctggaccccagtggtccttcctgcctggacttaggatcttttggggaagtttgggatctggcagggcatctgcataatccatagaaatccctgagagtcacttcccttggctgacatctccatgttcctacccattaccttccaaaggagacccttaactgaattaccaaagggggcttcccagagcagggaaacccggttaactttctatttcaggtcaacagtatacttgagatgtacttgaactagaaatgattggttgtttaggtgtgggcatttgtttttcctaacttagtctccaagaaaaaaaattattgaggttttacagcctagcctgtggtctatcctgaagaatgttcgtgtgtgtgacaatgtacattctttttttccccccagctctgtcaaatcttactgaggagcttttacggcctagcctgtggtctgtcctggagggtatttgtgtgtacaacaatgtatattcttaaacattatcttagattccattttggatgttcccatcaggactgtgtgtttctgtgctggaactcaagtgaacactggctcaacatccttagaaatccagcccaattctcttggttaaagataaggtatgtgtggtaggcattgctttttctctttggggacaaaactcaggaggattgccccttgatgaacaaggctaacctgctaagcctttgaagcaaggaactggagatggtcctttcaggggtttatgttctggattccataaaacatgcaaacaggggcaatgaatgcaccttttttatttttatttttatttttttttgagatggagtcttactcttgccagtctggagtgcagtggcacgatctcggctcactgcaacttctgcctcctggttcaagtaattcccctgcctcagcctcccgagtagctgggactacaggtacatgccaccacaggcggcaaatggttgtatttttagtagagacggagtttcaccatgttggccaggatggtcgtggtctcttgaccagcctcccaaagtgttgggattccaggcgtgagccaccgcgcctggccaatgaatgcatctttatttttgtgttcattttaatctggtaaggtaaattccaacaaaaaacccagagttttggagtgagaagatctcatgcagtcattctccaaaagaaagcactttctgttgtctgaaagcagagtgccttcttttggagcgttactgtttgagaaaaaccacgttgaagttgatgctgatcttggtaacacatttgcagagcgtgcttatcatcagacttgcatgatgttggggttctgtttttgtttagtttttttgcaacacagggtctcttgcccaggctggagtgcggtgacacttccaacctagacctcttgggctcagttggtccctgcccccaccccctcccccttttttttctcttgagacagtctctctctgtggcccaggctggagtgcagtggtatgttctctgctcactgcaacctctgcctcccgagtagctggtattacaggcacatgccaccacgcctggctaatttttgtatttttagcagagacggagtttcatcatgatggccagattagtcttgaactcctgaccttaggtgatccacctgcctcggcctcgcaaagtgctgggattacaggcatgagccactgtgcctggcccacaacgtatattcttaaatatcatcttagattccattttggttgctcccatcgggactgtgtgtccctgtgctggaactcaagtgaacacatggctcaaaatccattgctgttctctagaaatccagcccaattctcttggttaaatataaggtatgtgtggtaggctttgctttttctctttggagacaatactcaggagggttgccccttcgtgaacaaggctaacctgctgagcctttgaagcaaggaactggagatggtccttttaggggtttatgttctggattccagaaaacatgcaaacagggacaatgaatgcatctttatttttgtgtccattttaacctggtaaggaaaattccaacaaaaacccagagttttggagcgagaagatctcatgcagtcattctccaaaagggagcactttctgtttgaaagaaaacaaagtgcctccttttagagtgttactgtttgagaaaaaccacgttgaagttgatgctgatcttggtaacgcatttgcagagcgtgcttatcatcagacttgcatgatgttggggttctgtttttgtttagtttttttgcaacacagggtttctgttgcccgggcaggagtgcggtggcgcttccaacctagacctcttaggctagttggtcccccctactttttttgttgtttttgttcttgagacagagtctcactatgtgggccaggcgggcaggcagtgacacattctctgctcactgcaacctcggcctcccaagtagctggtattataggcacgtgccaccacgcctggctaatttttgtatttttagcagagatggagtttcaccacattggccaggttagtcttgaactcctgacctcaggtgatctgcccgcctctgctttccaaagtggtgggattacaggcatgagccaccctgctcggactgcagggtgtttttttttttttttttaattattatttgtatttttttgtgctgccaaagcaagcacttgtgtgtaggaattttgtttgtttgtttgtttgtttgtttgagatggagtctcattcttgtcgcccaggctggagtgcagtggcatgatctcggctcactgcaacctacgccttccgggttcaagcgattctcctgcctcagcctcctgagtagctgggatttcaggtgcatgccgccaccccggctaatttttgtccttttggtagaatcggggttttgccatgttggtccggctggtctcaaactcctgacctcaactaatccacctgcctcggcctcccaaactgctgggattacaggcatgagccaccgcacccggtgaggagttatttttaatgtgagcaaacagtatattcttttttttttttttcatagacagggtctcaacaatatatgatgtatatttaatcatatagtcttatcatgtatataatgtagtcatatgtacaccaaaccctgttctacacacggagaatactcttgtatcactttgggtatttatttacttgtttctttctgtgtttttcttgtttgtttgtttgttttgttttgagacaaggtctagctttatcacccaggctggagtgcagtggtgccatgtcgacttactgcaacctccacctgccacctcagcctcctgagtacttgtctacaggtgcgcaccaccacacccagctaacttttctattttttgtgcataaggtttcaccatattacccatgctggttgagctcgaactcctgagctcaagtgatcctcctgccttgccctctttaagtgctgggtttattggtgtgagccaccacgccccacccatacttgtgtatttctgtatttattgaggagcttatacagcataccctgtggtctatcctgcaggatgtttgtgtgtgagacagtgtatattcttgaacatagtagattccattttggatgctcccatcgggactgtgtgtccctgtgctggaactcgagtgaacacttggctcaaaatccattgctgttctctagaaatccagctcaattctcatggttaaatataaggtatatgtggtaggcattgctttttctctttggggacagaactcaggaggattgccccttgatgaacaaggctaacctgctgattctttgaagcaaaggactggagatggtccttttaggggtttatgttctggattccagaaaacatgcaaacagggccaataaatgcatctttttgttttgttttgttttgtttttgagatggagtctcgttctgtcacccaggctggagtgcagtggcacaatcttggctcactgcaagctcagcctcctgggttcacgccattctcctgcctcagctttccaagtagctggggctacaggtgcccaccaccacgctaggctaattttttgtatttttagtagaggcggggtttcaccctgttagccaggatggtcttgatctcctgacctcgtgatctgcccgcctcggcctcccaaagtgctgggattacaggcatgagccactgcgcccggccccaataaatgcatctttatttttgtgtccatttaaacctggtcaaggaagattcccacaaaaaatccacggtgctggagcaagaggatctcaggctgtgaccctctaaagggaagcgctttctgtggtcagaaagaaaagcaagtgcttccttttagagggttaccgtttgggaaaagcaatgttgaagttgatgctgatcttggtaaaatatttgcagagcgtgcttatcatcagacttggatgatggtggggttttgcttttgttttgttgtattccaagacaaggtccctgttgcccaggctggagtgcggtgacacttcaacctacatttcttgggctccggtcgtttttgtttgtttgtttgtttgtttgacagggagtctcactgtgtgtctcagcaatgcagtggcactatcttggctcactgaaacctcagcctcctgagtagctgggatcacaggtgcgtgcaaccacgcccatctaatttttgtattttttgcattttcagtagagacggggtttcaccgtgttagccaggatggtctcgatcttctaacctcgtgatccgcccgcctcggcctcccaaagtgctgggattataggcgtgagccaccgcgcccggccgagaaactaatcttttgagatgaactctgagatgtggattttagcttgtttgcagccaccaccactctagttttggaagattttcatcaccccgaagaggcttatactcatttgcagtcagtacccacccacctcttccacccagaccgtggcaacgactccccatctctctagctctggatctgcctcttgtaggccggtcacgtagaccaatcttgtatgggtgtccagttgaggataatgggttggtcctggttgtctgcaatgtgaatcttaccactgaagggtggtccctggagggaagcaggaggctgggagaactgggcggaacatcctttgggaatggagtggggcgggcagaccctgatgtctgggaagctcacaagggtggaagaccccatcttcctccctgagaactgcaaggtgaccctcctggggcactggaaggagtgaaggcctctgggctgggaacgtcagggcactgcaccgatgcaggcaggatgagccgaggggaaaggagaagcaggcatcattctctggggacattttgggtttgatctggatggagcaggtgtcttctgggagagagagcccctgggattttcactctgctccctggctgtcttagtcatggaatctgacaacagagactcctgcccagggccacttcatttggtttctggagcccagtggtccttcctgcctggacttgggatcttttggggaagtttgggatctggctgggcgtctgcataatccatagaaatccctgagagtcacttcccttggctgacatctccatgttccttacccattaccttccaaaggagacccttatctgaattaccaaagggggcttcccagagcagggaaacctggttaaatttgtatttcagattaacagtatacttgagatgtacttgaagtagaaatgattggctgtgggtgtcggcatttgttttttctaattttaaatatgggaccatcatgaatttgggtgtcactttgtgcaggggacgtgggaatcgctgtcatttttttttttttttaacatatgctgccagagaaggcacttaggtggagaaattactcttcgtgtgagcattcagtatatagaacttccttttctgggggcagtgtcttatatatgatacacattttatcatatcatcttctatagataatataatgattaacacaaaacactcttctacacacacagaatactcttgtatcactttgggttttttttccttcgtgtgtgtgtgtgtgtgtgtgtgtgtgtgtgtgtgtgtgtgttatgagacaaggtctggctctgtcacccaggctgcagtgcagtgttgcagtcttggcccatgccccaccgcagcctctggaatagctgtctgcaggccaggcacggtagctcaggcatgtcgtctcagcactcttggagaccaaagcaggctaatcacctggagtcaggagtttgagaccagcctggccaagatggtgaaacctcatttctactaaaagtacaaaaattagccgggcgcggtggctcacgcctgtaatcccagctcttagggaggcagaggcaggaggatagcttgagcccaggagtttgagacctgcctgggcaatacagtgagaccctgttctccacaaaaagaaaagaaaaaaaagaaaaaaaaattttaaaaatgcaaaattaggtgggcatcgtggcacgtgcctgtaatcccaggtaccccagaggctgagacaggagaattgctggaaacctggaggcagagcttgcagtgagctgagatcacggccctgcactacagcctgggcaacaaagtgagacttgtttcaaaaaaaaaaaaaaaatttattgaggagcttttatggcctagcctgtgttctatcctggagaatgtgtgtacaacagtgtatattcttaaacatcatcttagattccattttggatgcttgcatggggactgtgtgtccctgtactgggacttatgtgaacacttggcttcaaatccattgctgttctctagaaatccagcccaattctcatggttaaatataaggtatgtgtggtaggcattgctttttctctttggggacagaactcaggaggattgtctcttgatgaacaaggctaacctgctgagcctttgaagcaaggaactggagatggtccttttaggggtttatattctggattccagaaaacatgcagagagagtcaataaatgtatctttatttttgtgtccattttaaccaggtgaggaaaattccgtcaaaaaacccagacttttggagcgagaagatctcatgcagtcattctccaaaagaaagcactttctgttgtctgaaagcagagtgccttcttttggagcgttactgtttgagaaaaaccacgttgaagttgatgctgatcttggtaacacatttgcagagcgtgcttatcatcagacttgcatgatgttggggttctgtttttgtttagttgttttgcatcatggggtctctgttgcccaggctggagtgcggtggcgcttccaacctagatctcttgggctcaagtggtcccgtgcttgctttttttttttttcttgaaacagagtctctgtctctggcccaggcttgagcgcagtggcatgttatctgctcactgcaacctctcctcccaagtagatgggattacaggtgcacgtgccacgacgcctggctaatatttgcatttttagcagagatgcagtttcatcatgatggccaggttagtctccaactcctgacctcaggtgatccgcctgcctcagcctcccaaaatgctgagattataggtgtaagccacccagcctagcctccaattttttttaatgtgtgctgccaatgcaagcacatatgtgtaggaattatttttcatgtgagcacatagtatatggaacttaatttttattgatgtacggtctcaaaaatatatattttatcatattcttattatacatgtaacatagtcatatacacacaaaacactcttctatacacagagaatactctcgtatcactttgggtaattttttgtttgtgtgtgtatgtttttgttttttttttagataaggtctgggtctgtcacccaggctagagtgcagtggtgccatctcagcttattgcaacctccacctgccacttcagcctcttgagtagctgtctacaggcgcacaccaccacgcccggctaacttttctgttttctctacacatgaggtatcaccatgttgcccaggctggtctcaaactcttgaactcaagtgatactcctgcctcagcctcctaaagggctgggtttagaggtgtgagccaccacacctcacctgtacctgtgtgtttctgctcattttattgaggagcttttacagcctggcctgtggtctctcctggagggtgtttgtgtgtgtgacaatgcatattcttcaacatcgtagattccattttggatgcccccgtcgggactgtgtgtcactgtactggaactcgagtgaacacttagctcaaaatctattgctgttctctagaatccagcccaattctcatggttaaatataaggtatgtatagtcggcattgctttttgaaacaaggaactggagatggccctgataggggtttatgttctggattccagaaatcatgcaaacagggccaataaatgcatctttatttttgtgtccattttaacctggtcaaggaaaattccaacaaaaaatcaatggtgctggagcaagaagatctcagcctgtgaccctctagagggaagcgctttctgttgtctgaaagaaaagaaagtgcatctttttagaggattacagtttgagaaaagcaacgttaacgttcatgctgatctcggcaatacatttgcagagcgtgcttatcatcagacttggatgagggtgggcttttgttcctggtttgtttgttttctaagacggggtctcttttgcccaggctggagagcagtggcacttccaacctagctctcttgggctcaggtggtcctctttgcagggtcacgatctctgctcactacaatctccccttcccgggttgaagtggttctcccatctcagtctcctgtgttgctgggagtacaggcccatgccaccacgcccggctaatttttgtatttttagcagagatggggtttcaccgtgttgaccaggatggtctccatctcctgacctcgtaatccacctgcctcggcctcccaaagtgctgggtttacagtcatgaaccactgcacccggcctttgatcttaattttcaatatgagacccatcatgaatttgggcatcacctctgcacaggggccatggtgatctctgtcactccattcatttcttatgtgtggagcaaacatttatgtgtaggagtaattctttatgtgagcatacagtatatggaactttctttttttttgagatagggtctggaaaataaatgatgtacagccaggcgcatgagtatatgagcagtttttgtgtgtatacgacatgagcggtggctcatgcctgcaatatcaacactttggcaggttgaggcgagtggatcacttgaggtcaggagtttgagaccagcctgaccaacatggtgaaaccctgtctctactaaaaatacaaaaaattagccagctatggtggcgcacgcctgtattcccatctgctggggaagttgagggaggagaatcacttgaacggacagatggaggttgcagtgagccaagatcacgccaccacactccagcctgggcgagagaataagactgtctcaaaaaaaaaatatatatatacatatatatttatatagagagagagactctgtctcaaaaaaaaaaatatatatatgggtgtgtttgtgtgtatatatatattatatatgatgtatatttcatcatatagccatatatataattatatacacaaaaaatactcttctacacacagagatgactgatatcactttggggtggtttttgcttgtgtgttcttttaaatttttttttgcaacaagatctggctcagtcgcccaggttggagtgcagtgtttcagtcttggctcactgcaaccttcgcctcccaccccagcctcctgaattagtgtctacaggcatgtaccaccacacctggcctacatttgtatttttttacagacagggtttcaccgtgttgtacacgctggtcttgagctcctgagctcaagtgaatctcctgccttggcctcctgatgtgctgggattagaggtatgagccaccacacccaactggtacttgtgtattcctgttcaaattttattgaggagcttttaccacctagcctgtggtctatcctggaggatgtttgtgtgtgcgacaatgtatatagttcaacatcttagatcacattttggatgtttccaatgggactgtgtgtctccgcactggaactcaaatgaacacttggctcagaatccatttgctgttctctggaaatccagtccaattctcttggttaagtataaggtatgtctagtaggcattgctttttctgtttgagaacaaaactcgggaggattgtcccttgatgaacaaggctaacctgctgagcctttgaagcaaggaactggagatggtccttttcaggcgttttattctggattccagaaaacatgcaaacagggccactaaatgcatctttatttttctgtccatttaaacctggtcaaagaaaattccaacacgaaacccagagtgctggagcaagaagatctcaagctatgagtctacaaaggaaagcgctttctgttgtcagaaagaagagaaagcgcttcccttttgagggttacggtttgagaaaagcagtgttgaagttgatgctgatcttggtaatacatttgcagagcatgcttatcatcagacttggatgatagcggggttatgttttggttttgtgtttttctaagacagggtctccgttgcccaggctggagtgcggtggcacttccaacctagctctcttgggctcaagtgatcctctttttatttatttatgtattcatttttgagatggagcctggctctgtcacccaggctggagtagagtgggatgatctccactcattgcatcctctgcctcccaggttccagaaattctcccacctccgtgtcactagtagctgggattacaaatgctcaccactatgacctgccagtttttgtacttttggcacagacggggtttcaccatgtttgcggggctggtctcaactcctgacctcaagtgatctgcctccttggcctcccacagtgctggggattatagatataagccaccgtgcccggcccattcctgtctttttaatttaatctgctcgtccctgacatcgaaaatttttcttgcttaacagcttccacttatttctcggaatagacctttttctgcaggaagggtgtagttgattcaaccctcacccactcatgccaaccgtagtgagtgctgtgactgcagctgcactgtttatcctgttttctgcaggtaatttttccagtgtaccattccaacctgcaaaacctcacatttaaatgcaaatttcttggtaagctgtgaaatgttggctgtggctaatatgagaaacaagctattatagacaagatgaatctcagttgcagtgataaatgtcacatgggacaaaaccacagatactttcacaaaaaccttgaggaccctagaagggcctccctagtaacaggtgggatgcgcatccgctcttgttgccatagtgagtgatgcctgttcgtccagccctcaacacctttcactccgtggaagttatgcctgcactggtttacagaacctcccttgacttgacttgaggtagagttgaagggaacctcagtgtcccttgcagatgggatgtgcattgcttcgcaagagcacagaggtggagtgcatgggctttgagtttttattgggtaaatgaagctgaaatacagggtgtatgaccacgttatcaacgcacacttgatttaggttttgtattttagagacgggggtgtgagctgccaaagcaaggacttatgtgtaggaattattctttctgtgagcatacagtatatggaactttctttcttttgagacagggtctcaaaaatatatgatgtatggccaggtgcggtggatcacgcctgtaatcccagcagtttgggaggccgaggcgggtggataacctgagatcaggagggcgagaccagactggccaacatggtgaaaccatgtctctgctaaaaatacaaaaaattagccagggctggtggcgcacgcctgtagtctcagctactccggagggtgaggcaggagactatcactttgagtgtgtgtctttgtgtgtgtgtgtgtgtgtgtgtgtgtgtgtgtatgtgtttctagtttttacaagacacagcctgactatatcaccgaggctggagtgcagtggtgcaatgttggctcactgcaacctccacctgccaccgcagcctcctgaattagtgtctacaggtatgcaccaccacacctggctcacttttgtattttttgtacagatgaagcttcaccatgttgcccaggcttgtctggaactcttgagctcaagtgatcctctcacttcggcgtcctgaagtgctggggttagagatgtgagccaccgcacccaacaggtacttgtgtatttttttattgaggagcttttacagcgtagcctgtggtctctcctggaggatgtttgtgtgtgcgacaatgtacattcttcaacatcttagattccattttggatgcccccatgggtactacatgtgcctatactggaactcaagtgaacacttggctcaaaatccattgctgttctctagaaattcagttcgattctcttggttaaagataaggtatgagtagtaggcattgctttttctctttgggggcaaaactcaggaggattgccccttgatgaacaaggctaacctgctgagcctttgaaagaaggaactggagatggtccttttagggggtttatattctggattccagaaaacatgcaaacagggccaggaaaaatgcatctttatttttgtgtccatttaaacctggtcaaggaaaattccaacaataaacccagagtgctggagcaagaagatctcaggctgtgaccctccagagggaagtactttctgttgtctgagagaaaagaaagtgcttccctttggactgtttcggtttgagtaaagcagcgttgaagttgatgctgatcttggtaatacatttgcagagcacgctcatcatcagactcggatgatgttggggttctgattttgtttttctccaagacagggtctctgttgcccaggctggagtgcagtggcagttccaacctagctctcctgggcccaagagaccctctatttatttatttatttatttatttatttatttatttatttattcattcattcatttagagatggaatctggctctgtgacccaggctggagtgcagtaggacaatctccactcactgcaacctccatctcccaggttccagcagttctgccacctcagcctcccatgtagctgggattacaggcgcccaccaccatgtcatgctaatttttgtatttttagcagagatggggttacaccatgtttgctgggctgttctcaactcctgacttcaagtgatttgcctccctggcttcccaaagtgctggtattacaggcgtgagccactgtgtccggcctcaagtggtcttcctgagtcagcctcccaagtagttgggattacatggggcgtgacacaacacttggttcagcttttaatttttggtagagatggggtctctgttgctcaggacggtctcaactcctgagctcaagcgatcctacaggtgtgagccaccttgtcctgatgacccatttcaaagatagttgacttggccaggcatcatggggcacacagtcccagttactgcaggggccggggcgggagggtgctttgattttaaggctataccgtgcacagatcccacctttgaatagccactgcactccagcctgggccaacatagcaagatcccatttctttaaaaacagattacatagcacctggtcccacagatttcatttgggttggtcatgtcatacaatggcctcccatcaatttagtataatcaatccaaaccatggttccttcattaagagagtgggtaatcctccaagtccatccagtctattctgtaatccccagtgggtgtccgtattgatacaatttctttttgttcctgttcactcgtgtctttttagtgtaatctgcttgtccgtaacactgaaatttgtttttccccaacatcttgccatcatttctcggaatagacctgctttctctgcaggaagggtgtagttgattcaaccctcacccactaatgccaaccccagtgagttctttgactgtagctgccatgtttatcctattttctttgggtaacgattccaaggtaccattccaatgggcttaaaccttgcatctaaatgccagttacttgctaagatgtcaaatgtgtcttatattagctgtggctaatataagaaactgttgtagacaagatgaatctcagtcacagtgataaatgtagcatgcaacaaaaccagttgttttcacaaaaatcttgaggaccctagaaggggctccctcgtaacaggtggaatgcacagcagctcttcttgttgccatagtgagcgatgcatgttcttccagtcctcaacaccttttatttatttatttatttatttatttattttattattattatttttttttgagacagagtctcgctctgtcacccaggctggagtgcaatggtgtgatctcagctcactgcaaccactgcctcccgggttcaagcgattctcttgcctcagcctcacgtgtcgctaggactacaaccgtgcaccaccacgcccggctaatttttgtatttttaatagagacagggttttgccatgttggccaggttggtctggaactcctgacctcagttggtccacctgcctcagcctcacaaagtgctgtgaatacaggtgtgagccaacacgcccggctatcaacaacttttcctacgtagaaattattcgggcactggtttatagaacctcacgtgggttcacgtagaattgaaggggacctcagcgtcccttgcagatgggatgtgcaatgtatttgagatgtactcgaacattgctgttgaggtgtgggcatcttttgctttttcctaattttaaatatgggactagtctgggtatggtgacttccaccagtaattctagcactttgggaggctgagacaggaggatcacctgaggtcagttgttcgagaccagtctggccagcatggtgaaaccccgtctctactaaaaatacaaaaattagccgggtgtggtggcactcacctgtaatcccagctactcgggaggctgaggcaggagaatcacatgaatctgggaggcggaggttacagcgagcagagatcacaccgttacactcctgcctgggcaacagtgtgagactctgtctctaaataaataaataaataaaaataaaaataattaggtgaatatgggaccagcatggacttgggtgtcgcctttgtgcagtggccaggatattctatgtcatttaaatttttttatgtgtacttccaaagcaagcagttatgtataggaattattcttcctataagcatgcaatatttggaactttctttgagacagggtctcaaaaatacatgatgtatatttcattttatattcttatatattatgtacacacaaaatactcttctaaacacagagaatactccgatatcacctagggtgtgtgtgcgtgtgcgtgtgtgtgcgtgtgtgtgtggttcttttctgagacaatatctgcctctgtcacccaagatggagtgtggtggtgcaatctcggcttactgcaacctccacctcccacctaagcctgctgaattagtctctacaggcatgcaccaccacacctggctaacttctgtaatttttgtacacatggggtctcgccatgttgccggggctggtctcgagctcctgaggcaggtgatcctcctgcctgggcctcctaaagttcgaggagttagaggtctgagccactgggccccacttgtacttgtgtatttctgctcaaattttattgagtagtttttacatcctagcctgtgatctactctggagagtgtttgtgcatatgacagtgtatattcttcaacatcgtagactccattttggatgctcccttcgtgactgtgggtcctgtactggaactcgagtgaacacttggcttaaaatccattgctgttctccagaaatcctgcccaattttctcggttaaaggtacgtgtagtaggcattgctttttctctttggggacaaaactcaggaggattgccccttgatgaacaaggctaacctgctgattctttgaagcaaggaactggagatggtccttatagagttttatattctggattccataaaacatgcatacagggtcaataaatgcatctttatttttgtgtctattttaacttggtcaaagaaaattccaggaaaaaatccacggcatcagagcaagaagatgtcaggctgtgaccctcttgagggaagcactttctgttgtctgaaagaagagaaagtgcttccttttagaggcttactgtctgagaaaagcaacgttgtagttgatgctgatctttgtaatatctttgcagagcacgcttataatcagacttggatgatgttggggttttgtttttcttttgtttttttatctaagactgggtctctgttgcccaggctgaagtgcagtggcacaatcttggctcaccacaacctccgcctcccgggttcaagtgattcttctgcctcagcctcccaagtagctgggattataggactgcgccaccatgcctggctaattttgtatttttagtagagacagggtttctttaggagcttttaaggcctcccttgtagtctatcctggaggatgtttgtgtgtgcaacaatgtatattcttcaacatggtagattccattttgactgctctaatcaggactgtgtgtccctgtgctggaaatcaagtgaacacttggctgaaaatccactgctgttctctagaaatccagcccaattctcttggttaaatataaggtatgcatagtaggcattgctttttctttctggacacaaaactcaggaggatttccccttgatgaacaaggctaacctgctgagcctttgtaggaaggaacgggagatggtctttttaggggtctatgttctggattccagaaaacatgcaaacagagccaataaataggtctttatttttgtctctattttaacctggtcaaggaaaatttctacaaaaaacccagggtgctggagcaagaagatcccatgctgtgaccctctagagggaagcgctttctgttgtctgaaagaaaagaaagtgcatccttttagaggtttactgtttgaggaaagcaacagtgaagttgatgctgatcttggtaatacatttgcagagcatgcttatcatcagacttggatgatggtgggattctgtttttattttgtttttttttctaagacagagtctctcttgcccaggctggagtagggtagcacttccaacgtagatcttttaggctcaaacggtcctcttttttttttttttttttttgaggcggagtcttgctctgtgacccagacgagagtgcaatggcgcgatcttgtgtgcaagctcacctcctgagttcaagcaattcttctgccccagcctcccaagtagctgggactacaggtgcctgccaccacttccagctaatttttgtatttttagtagagacagggtttcaccacgttggccaggctggtctcaaactactgacctcaagatccacccacctcagcctcccaaagtgctgggattacaggcgtgggccattgtgcccagcggtcctcttttttgagatggagtcttgctctgtgacccaggctggagtgcagtggcaggaacttcgctccctgtaccctccacctcccagattcaagccattctctcctgagtcagcctccctagtagctgagatcgcagacatgagccaccatacccagctaatttttgtatttttattatttatttatttactcatcgatttttgaaacagagtcttactccgtccatcaggctggaggtcagtggcacaatcccacgttcaagcaattctcctgcctcatcctcccgagtagctgggatcacaggcgcacaccaccacgcccggctaatttttgtgttttttttgtttgttcgttttttttttttttgtagagacagggtttcaacatgttggccagcccagtctccaactcctgaccttaagtgagcccatacacaatcaagaagagagcgagacctgttctttttttctgtctttgactatttgagacagtcttgctctgtcacccgagatggagtacattagtgtgatcttggctcactgcaacctctgcctcctggactcaagcaattctcttttttttttttttggagaaagagcctctctgtgtctcccaggctggactgcagtggtgtgatctcagctcactgcaacctcagccttccaagtagctgggattgcagacatgtacccccataccagctatatatatatatgtattttagacacagtttcaccatgttagccaggccattcttgaatcctgacctcaggtgatttgccgacgtaggcctcccgaagtgctgggattacaggtatgagccactgcactcagccttttttcctaattttgaatatgggacccattatgaatttgggtgtcacctatgtgcgggggctatggaaatctctgtcaccccattcatttgtgtgtgctgtcaaagcaccaatatgtgggaattatgctttatgtgagcatatagtatatggaactttggtttttttttatacagggtctcaaaaaaaaatgagtatatttcatcacaatgttctgtgtataattccatacacacaaaatagtcttctatacacagagaacactcttatatcactttggagttgtttttgtttgtgtattttgttttaatttttatgagacagggcctggctatgtcgctgaggctggagggcagtggtgagatcttggctcactgcaacctccacctgccacctcagcctcctggattagtgtctacaggcaggcaccaccacccctgggtaagttctgtatttttggtactgatgaggtttcagcacgttccacaggctggactcttaactcctgcgatcaagtgatcctcccgctgttcaaattttactgaggagcttttaaggcctcgcctgtggtctgtcctgtagtgtccctgtcctggaactcaagtgaatacttggtttaaaattgattgctgttctctagaaatccagcccaattctcttggttaaatataaggtatgtgtagtaggcactgctttttctttctggaggcgaaactcaggaggattgccccttgatgaacaaggctaacctgctgagcctttgaagcaaggaactggagatggtcgttttaggggtttatgttctggattccagaaaacatggaaacagggccaataaatgcatctttatttttgtgtccattttaacccagtgaaggaagatttcaaccaaaaacccacggtgctggagcaagaagatctcaagctgtgactctccagagggatgcactttctcttatgtgaaaaaaaagaaggcgcttccctttagagcgttacggtttgggtaaagcaacgttgaagttgatgctgatcttggtaatatatttgcagagcatgcttataattaagacttggatgatggtgggtttctgttttgttttttgttttaaatcagagtctcactctgtcacccaggctggagtgcaatggcgcaatctcggctcactgcaacttccccctcctgggttcaagtgattctcctgcctcagcctcctgagtagttaggattacagacatgcgccacctcacccggctcagtttttgtatttggtggagatggggtttcaccatgttagtcaggctggtcttgaactcctgatctcaggtgatccacctgcctcagcctcccaaagcattgggattacaggcgtgagccaccacgccaggcctgttcaacatcttagatttcattttggatgttcctgtgaggactgcgtgtccctgtgctggaactcaagtgaacgcttggctcaaaatccattgctgttctctagaaatccagccaaattctattggtgaaatataaggtatgtctagtagtcattgctttttctctttggagacaaaactcaggaggattgccccttgatgaacaaggctaacctgctgagcctttgaaacaaggaactggagatggtcctttcaggggtttatattctggattccagaaaacatgcaaacagggccagtaaatgcatctttatttttgtgttcattttaacctggtcaaggaaaattgctacaaaaaacccagggtgctggagcaagaagatctcatgctgtgaccctctagagggaagcgctttctgttgtctgaaagaaaagaacgcgcttccctatagagggttaccctttgagaaaagcagcattgaagttgatgctgatcttgctaatacatttgcagagcatgcttatcatcagacttggatgaaggtggggttctgttttttttttttttctaagacaggatctctgttgcccaggctggaatgtggtggcacttccaacctagctctcttgggctcaaatggtcctctcttttgggatagagtcttactctgtgacccaggctggagtgcagtggcgtgatctcagcttactgccacctccacctcccagtttcaagccgttctcctgcctcagattcctgagtatctgggattataggtacctgacaccacgcctggctaatacttgcatttttctttcttttttcttttcttttttttttttttttttttgagatggagtcttactctgtcaccaggctggagtgcagtggtgcgatcttcgcttatttcaacctccgcctcccagtttcaagtgattctcctgcctcagccacccgactaactaggatttcaggcatgcaccacacgcctggctaattttttgtatttttagtagagacagggtttcaccatgttggtcaggctggtctcgaactcccgacctctggtgatcttcccgccttggcctccgaaagtgctgggattgcaggcattagccaccccgcccggccattatatattcttatatatataataccatatacgtgcaaaatactcttctacatgaagagaatactcttatatcactttggggttttttttgtttgtttgtgtgtgtgtgagtgtatgttttatttgtttttggataaggtctggctctgtcacccagtctagagtgcagttgtgccatctctctcagctcactgcgacttctacctcccacctaagcctgctgaattagtgtctacaggcatgcaccaccacacctggctccgttttgtattttttatacacatgggcttacaccatgttgccgagactggtctcgaacacctgagctcaggtgatacttcagtttcagcctcctaatgtgctgggattagaggtgtgagccaccgtgccccacttgtagttgtgtgtttctgttcaaattttattgaggagtttttagggcctagcctgtgatctaccctggaggatgtttgtgtgtacaacaatgtatattctttaacatcgtagattccattttggatgctcccatcgggactgtgtgtccctgtgctggaactctggtgaacacctggctcaatatccatttctcttctctagaaatccagcccagttctcttggttaaatataaggtacatatgtctatgaggcattgcttttgctctttgagaacaaaactcaggaggattgctctttgatgaacaaagctaacctgctgatcctttgaagcaaggaactggagatggtccttttaggggtttatattctggattccagaaaacatgcaaacagggccaataaatgcatctttgtttttgtgtccattttaaccgggtgaaggaaaattccaacaaaaaacccagagtgttggagcaagaagatctcatgctgtgaccctctagagggaagcactttctcttgtctaaaagaaaagaaagcgcttctctttagaggattactctttgagaaaagcaacgttgaagttgatgcttatcttggtaataaatttgcagagaatgcttataatcagacgtggatgatgttggtgtttcatgtttgttttgttttgtttttaatacagggtgtctgttgcccaggctggagtgtggtggtccctctccaacctagatctcttgggttcaagtggccctcttttttgggtcagagtcttgctctgtggccctggctggagtgcagtgtcaggatctctgctcactacaacctctgcctcctgggtaaaagcgattctcctgcctcagcctcccaagcaactgggattacaggcatgtgctaccatgcccggctaatttttgtaatttcctttatttatttttgagacagagtcttactctttcgcccaggctggagtgcagtggtgcaatctcggctcactgcaacctccaactcccacctcagcctcctgaatagctgtctacaggcatgcaccaccacacctggctaacttttgtattttttgtacagacatggtttctccatgttgcctgggctggtcttgaactcctgaactcaagtgatcctcccacctcggcctcctaaagtgctgtgattagaggtatgagccaccgtgccccacctgtacttgtgtgtttctgctcaaattttattggggagcttttatggtatagcctgtggtctctctggagaatgtttgtgtctatgacaatgtatattcttcagtatgttatgttccattttggatgcttgcatggggactgtgtgtccctgtactgaaactcaggtgaacacttggctctccgtccattgctgttctctagaaatccagcccagttcccttggttaaagataaggtatgtctagcaggtattgctctttctcttgcagacaaaactcaggaggattgccccttgataaacaaggctaacctgctgattctttgaaggaaggaactggagattgtccttttaggggtttatattctggattccagaaaacacacaaatagaaaacagggcaaataaatgcatctttcttttcgagtccattttaacctggttaaggaagattccaacaaaaaatccacggtgccacagcaagaagatgtcaggctgtgtccctctacagggaagcgctttctgttgtctgaaagaaaagaaagtgcttccttttagagggttaccgtttaagaaaagcaacgtttaggtggatgctgatcttggcaataatacatttgcagagcatgcttatcatcagagttggatgatggtggggttctgtttttttgtttttttttttctgagacagagtgtctattgcccaggctggagtgcagtggcacttttaacctagatctcttgggctcaagtggtcctgttttttgggataatctcacactgtgacccagtccggagtacagtggcatgaacaccactcattgcatgctttgcctcccaggttcaagtcattcttatgacccagcttccagagcagctgggattacaggcatgagccaccacactggctaatttttgtatttttaatagagatggggttcaccatgttggccaggctggtctccaactactgacctcatgatccacccacgtcggccttccaaagtgctgggattacagacgtgagccactgtgcccggccaacacagagaatactcttatatcactttggggttgtttctgtttgtgtattttttaaatattttttgagacacagtctggcgctattacctaggttggagtgcagtgttgtgacctcggctcacagcaacctctacctcccagctgagcctcctgagttagcatctgcaggcatgaaccacaacacctggtaacctttgtatttttggacacatgaggtttcaccatgttgcccaggctagtcttgaactcctgagctcaagtaatcctcctgcctccgactcctaaagtgctgggattacaggtgtgagccactgcaccccacctgtacttgtgtatttctgttcaaattttattgaggagcttttacggcctagacagtagtctatcctggagaatgtttgtgtgtatgacaatgtatattctttttttttatttttattttttggagacggagtctcactctgtcacccaggctggagtgcaatggcatgatctcggttcactgaaacctccgcctcctgggttccagcgatcctcctgtctcagcctgctgagtagctaggattacaggtgggcgcctggctaatttagattccattttggatgctcccatcgggactgtgtgtccctatgttggaactcaggtgaacgcttggctcaaaaatccattgctgttctctagaaatcctgcctaattctcttggttaaagataaggtatatgtagcaggcattgctttttctctttggggacaaaactcaggaggattgcgccttgatgaacaaggctaacctgctgagcctttgaagcaaggaactggagatggtccttttaggggtttatgttctggattccagaaaacatgcaaacagggcaaataaatgcatctttattttgtgtccattttaacctggtcaaggaaaattccaacagcaacatcaaaaaaccagtgttggagcaagaatatgtcatgctgtggccctccagagggaagcgctttctgttgtctgaaagaaaacaaagcgctcccctttagaggtttacggtttgagtaaagcagcgttgaagttgatgctgatcttggtaatacatttgcagagcgtgcttatcatcagacgtggacgatggtggggttctgttttggttttgtttttttctaagacagggtctccgttgcccagactggagtgcggtggcacttctacctagatctcttgggctcagatggtcttctttttatttcatttttttaattgtttgagatggagtctcactctgtcacccaggctggagtacagtggcaggatctccacaactacagcctcccaggttccagacattctcccacctcagcctcccgagtagctggaattataagcacccaccgccatgccctgctttttgtatttttagacaagaaagggtttcaccatattggccaggctcatctcaactcttgcccttaagtaatcctcctccctggcctcccaaagtgctgagattacaggcgtgagccaccgcgcccagcctcaagtggtcctcttgagtcagcctctcaagtagttgggactacgtggggcgtgccaccatacttggctaagtttttaatttttggtacaattggggtctctttttcccaggatagtctcatctccacagcttatgtggtcctacacgtgtgagccacctcgtcttgatgacccatttcaaagagagttgacatggccaggcattgtggggcacacagtcccagccactgcagaggccagggtcggagggacctttgatttccagactgtaccatgcactgatcacaccttcgaatagccactgcgctccagcctgggccaacatagcaagatcccatctctttaaaaacagattacatggcacctggttacagaggctccatttgggttggttatttgaaatgggtctcccatcaatttagtgtaatcaatcgaaatcatttccttcattaagagagtaagtagccggggcatggtgcctcatgcctgtaatcccagcactgtgggaggcaaaggcaggcggatcgcctgaggtcaggagttcaagaccagcctggccaatatggtgaaaccctatcactactaaaaatacaaaaattagccgggtgtggtggcgtgaacctaggaggctgaggttgcagtgagctgagattgcaccattgcactccaacctgggcgactgagctggacttaaaaaaaaggtaagtaagccttcaagtctatccaatcttaatttgtaatctcaaatggatgtccatattaacaaaattttcttgtttttcctgtttgtgtctttttagtttaatcttcttgtccttgacactgaaatttttttctctccaacaacttgccgtcgtttctcggaatagagctgctttctctgcaggaagggtgtagttgattcaaccgccacccactcacgccagccccggtgagttctttgactgcagcttccctgattatgctattttcttcgggtaatgaacccaaggtacctcgcatttaaaggctagttgcttggtaagctgtgaaatgttggctgtggctaatatgagaaacaaactatggtagacaagatgagtctcagtggcagtgataattgtcacatgggacaaaaccacagatacttttcacaaaaaccttgaggaccctagaagggcctctctagtaacaggtgggatgcgccgcagctctcgttgttgccgtagtgagcgatgcctgttcgtccagccctcaacaccttttactccgtggaagttatgcctgcactggtttacagaacctcccttgacttgggttgaggtagagctgaagggaacctcagtgtcccttgcaggtgggatgttcactacgtagcaagagcacaaaggtggagtgcgtgggctttgagtttctattgggtaaatgaagctgaaatgtagggcacatgagcacgtcatcaatgtacaattgatttaatttttgtattttagaaacggaggtctcgctatgccgcccagggtagaatgtgctctctccctctcctcttcctagtatctgggactacaggtgaatattttaatctatgcacaggcaagaagagggcaaggagggttcttttgttctgtctttgactttgtgaggcagtgtcactctgtcactcaagctggagtgcaataatgtgatctcggctcactgcaacctctgcctcctgggttcaagcaatttttttttttttttttttttgagtcagtatctcactctgtccctcagggtggagtgcagcggcccagtctctgctcctgcaacttctgactcccaagtaggtacaattgcagacacgtgtcaccacgcttggcaaaattttttttgtatttttagagctgggattttaccttgttggcgaggctggtctggaactcctgacctcaggtgactcgcccaccttggcctcccaacaagttatgctgatcttggtaataacttcgcagagcgtgcttccatcagacatggaggatggtggggtcctgttttgttgttgttgtttttctaagatagggtctcttgcccaggctggagtgtgttggcacttccaacctaggtgtcttgggctcaaatggtcctcttttttcggacagtcttgctctgtgacccatgctggagtgtagtgacgtgatctcagctcactgcaacctccacctcccagttttaggcagttctcctgcctcacattcctgagtagctgggattataggtgcctgacaccatgcctggctaatatttgcatgttatttattcatgtatttatttgttttgagatggagtctcactgtcactcaggccagagggcagtggcaggacctcggctcactcaaacctttgcctctcaggttcaagcaagtcttctgcctcaacctcctgagtagctggaatcacaggcacccgtcaccacgcccggttacttttgtattttttttttcaccatgttggccaggctggtctgaaacccctgacttcatgtgagccgcccgcctcagccacccaaagtggtgggattacaggcataagccactgcgcccggccaacaatgtatatttttcaacatgggagattcagttttgaatgctcccatcgggactgtgtgtccctgtgctggaactcaagtgaacgcttggctcaaaatccattgctgttctctagaaatccagcccaattctcttggttaaatgtaaggtatgtgtagtaggcaatgctttttctggagacagaactcaggaggattgtccctcgatgatctaggctaacctgctgagactttgaagcaaggaactggagatggtccttttagggttttatgttctggattccagaaaacatgcaaacagggccaataaatgcatcctcatttttgtgtccattttaacctggtgaaggaaaattccaacaaaaaacccacagtgctggagcaagaagagctcaggctgtgaccctctagagggaagcactttctgttgcttgaaagaagagaaagcgcttccttttagaggattactctttgagaaaaacaacattgaagttaatgctgatcttggagatcatgcttataatcagacttggatgatgttggggttttgtggggtttttttggttttttttcctaagacagggtgtctgttgcccaggctggagtatggtggcccctccaacctagatctcttgggttcaagtggccctcttttttgggacagagtcttgctctgtgaccctggctggagctcagtatcaggaactttgctcactgcaacctctgcctcccaggttcaaatgattctcctgcctcagcctcccgagcagctgggattacaggcatatgccaccacgcccagctaatttttgtattattgttatgtatttattttttaacttattcattttagagacagagtctcactctgtcgcccaggctggagtgcagtggtgcgatctcggctcactgcaacctccaactcccagctcagcctcctgaatagctgtctgcaggcatacaccaccacacctggctaacttttggtttttttgtacagatgtggtttccccatgttgcccaggttggtctcgaactccttagctcaggtgatcttccaccttggcctcctaaagtgctaggattagtggtgtgagctgttgtgccccacctatactcgtctgtttctgctcagattttattgaggagcgtttacagggtagcctgttgtctaccctgcaggatgtttgtgcctacaacagtgtatattcttcaacatcttagattccatttcggatgcccccatgaggactgtgcgctcctgtactggaactcaagcgaccacttggctcaaaatccattgctattctctagaaatccagcccaattctcttggttaaagataaggtatgtgtagtaggcattgccttttctctttgggaacaaaactcaggaggattgcccgttgatgaacaaggctaacctgctgattctttgaagcaaagaactgcagatggtccttttagggatttatgctctggattccagaaaacatgcaaacagggcaaataaatgcatctttatttttgcgtccattttaacctggtcaaggaagattcccacaaaaaatccacagtgccagagcaagaagatctcaggctgtcgtcctctagagggaagcactttctgttgtctgaaagaaaagaaagtgcttccttttagagggttaccgtttgagaaaagcaacattgaagttgatgctgatcttggtaatacattttcagagcatgcttatcatcagagatggatgatggtgggcttctgtttttgttttgattttttcttttttttttttttgagatggagtttcgttcttgctgcccaagcactagtatgtaggaattattctttatgtgagcatatagtacatggaactttgtttttttgagacagggtctccaaaatatatacatgttatcatataatcttctatgtataattatattcacacaaaatagtcttctgcacacagagaatactcttatatcactttggggttgtttttgtttgtgtattttttttttttttaattttttttgagacaccatctggctctattgcccaggctggagtgcagtgttgtgacctcaactcactgcagcctctacctcccacctcagcctcctgaattagtgtctacaggcatgaaccactacacctggctatcttttgtatttttacagatgaggttttactatgttgggcaggctagttttgaactcgagctcatgtaattttcccgccttcgactcctaaagtgctgggattagaggtgtaagccactgcactccacccgtacttctgtacaaatgttattgaggagcttttacggcctaggcagtgctctatcctggagaatgtttgtgtgtaagacaatgcatattctttttttctttcctgtcacccaggctggagtgcattggcacgatctcgtctcactgcaacctccgcctcccgggttcaagcaattctcctgcctcagcctcctgagtagctgggattacaggtgggcaccaccacgcctggcaaatttagattccattttggatgctcccatcatgactgtgtgtccctgtgctggaactcaagtgaccatgtgactcaatccattgctgttctctagaaatccacctcaattctcttggttaaaggtaaggtatgtgtagtgggcattgctttttctccttggagacaaaacttaggaggattccccttgatgaacaaggctaatctgctgagcctggagattgtccttttagaggtttatgttctggattccagaaaacggtcaaacagcgaataaatgcatctttatatttgtgtccatcttaacctggtcaaggaaaatttcaacaaaaatcccagatggctggagcgagaagatctcatgctgtgactctctggagggaagcactttctgttgtctgaaagaaaacaaagcgcttctctttagagtgttacggtttgagaaaagcaacgttgaagttgatgctgatcttggtaatacattcgcagagcatgcttatcaggcttggatgacggcagggttctgttttggttttatttttttccaagaccagtctctgttgcccaggctggagagggaggggttgcactccaaactagatctcttggggtcatgtcttgctctattattattattaattcttatttttgtgtgtgtgtgagacggagtctcgctctgtcaccaggttggagtccagtggcggaatctcagctcactgcaacctccgactccgtggttcaagcgattctcctgcctcagcctcctgagtagctgggattacaggcacgcaccgccatgccgagctaatttttgtatttttagtagagaccgggtttcaccacgttggccaggatggtctcaaactcctgacctcatgatccacccgcctcggcctcccaaagtgctgggattacaggtgtgagcctccgtgcccagcctgttattttattttgttttattttatttattttattttattttgagatggagactggctctgtcgcccaggctggaatgcagtggcaggatctccactcactgtaactcccacctctgtcgcccaggctggagtgcagtggcaggatctccactcaccgtggagttccagtgattctttcaccttagcctcgcaaatagctggtattacaagcacccaccaacacaccctgccaatttttgtatttttagacaagaaagggtttcgccatgttggccaggctggtctcgactcctgaccttaagtgatccacctccctggcctcccaaagtgctgggattacaggcgtgagccaccacgtccagcctcaagtggtcttcttgtcagcctcgcaagtagttgggctcaggttttaatttttggtagagatggggtctcttttgcctgggatggtctcagctgagcttaagtgatcctaaatgtgtgagccaccttgtcccatttcaaagataggtgacacggccaggcatcctgggacacacagggtcccagttactgcaaaggctagggtgggagggtcctttgattttaaggctataccatgcactgatcacacctttgaatagccactgcactccggcctgggccacatagcaagatcccatctctttaaaaacgcagattacatgccatctggttcctgaggctccatttgggttggtcacttcaaatacaggcctttcatcagtttagtttaatcaatccaaaccatgtttccttcattaggagagtaagggccaggtgtgtaatccaagcactttgggagactgaagcaggcggatcaggaggtcaggagttcgagaccagcctgaccaatatggtgaaaccccgtctctactaaaaatacaaagattaagtgggcgtggtggtgcgtgcttgtaatcccagctactcaggaggctgaggcagcagaatctcttcaacccaggaggcggaggttgcagtgagccaagatcgcgcaggtgcactccagcctgggcgacagagcgaggctccatctcaaaacaaaacaaaacaaaaaatataggcctccacatctatccagtctattctgtaatcccaatggatgtcaatattaatacaatgttcttattttttctatttatttgtatctttttagttgaatctccttgtccctgacactaaattttttttatttttatttatttattttttttgaaacagtcttgctctgtcgcccaggctgcagtacagtggcgcaatctcggcttactgtagcctctgtctcccgggttccagtgattctccttccccaactcccgggtaactgggattttcaggcacacaccaccaccccagctaatttttttgtacgtttagtagagacagggtttcaccatattgggcaggctggccttgaactcctgaactaaggtgatccgcccacctcggcctcccaaagtgctgggattagggataaggctaacctgcttattctttgtagcaaggaactggagatggtcattttaggggtttatgttctggattccagaaaacatgcaaacagggccaataaatgcatcctcatttttgtgtccattttaacctgggcaaggaaaattccaacaaaaaacccagagttctggagcaagaagatctcatgctgtgaccctacaaagggaagcactttctcttgtccaaaggaaaagaaggcgcttccctttggagtgttacggtttgagaaaagcagcgttgaagttgatgcttatctcggtaatacatttgtagagcatgcttatcatgaggcttggacgatggcggggttctgttttggttttgcttttttattctaagacaggatctctgttgcccaggctggagtgcggtggcacatccaacctaggtcttttggattcaaatggtttttttagcggacagagtctctctatcacccaggctgaagtgcagtggtgtgatctcggctcactgcaacctccacctcccaggttcaagcgagtctcctgcctcagcttcccaagtaggtgagattacaggtgcccatcaccacacctggataatattttcattttttaaaattcatttatttatgtttttgagatggagtctcactgttacccaggctggagggccgaggcgtgatctctgctcagtgcaacctctgcctcccggattcaagcaattcttctacctcagcctcctgagtagctagaattacgggagcccaccaccacacctggctactttttgttttttgttttttgttttttttttagtagagatgggatttcaccatgtttgccaggctggtctcaaacccctgacctcaagttagccaccggcctctgcctcccaaagtgctgggattacaggcatgagccaccacgcctggcctaatttttatattttcagcagaggcggggtttcaccatgttggccaggctggttgcgaactcctgacctcaggtgatctgcccacctcagcctcccaaagtgctaagattacaggcgtgagccaccacacatggccattaacaccttttagtccatggaaattattctggcactgatttataaagcctcatgtggggtcaggtagagtcaaagggggacctcagtgtcccttgcagatgggatgtgctcagcaagagcacggaggtggagtgcatggggtttgagttttcactggggaaatgaaaccaacatcttgggtgcatgaccaggtcatatatgcagtcatatatgcaatatgcatggtggtgggtgcctctaatcccagctactcaggaggctgacgcagaagaatcgcttgaacccaggaggcagaagttgccatgagccgagatcccaccaccgcatccagcctgggcggcagagtgagactccgtgtcaaaaaaaagaagatctcaggcagtgaccctctagatggaagcactgtctgttgtataaaagaaaagatcgtgcatccctttagagtgttactgtttgagacaagcaacgttgaagatgctgctgatcttggtaatacatttgcagagcgtgcttatcatcagacttgcatgatgtcggggttctgtttgtgatttgaaatttttccaagacaggctttctattgcccaggcgtgggtggatagcaccttccaccaagatttcttgggcttaagtggtcctctttttattttttgattttttgagacacactcttgtttcgttgggagtgcagtagcaggatctctgctcaccggaaactccacctctcgggttccagtgattctcccacctcagcctgccgaattgttgggaattcaggcatcaggcacccaccatcgtgtcctgcactcttgctgcccatcctggagagcactggcatgatctaggctcactgcaacctccgcctcctgggttcgagtgatgcttctgcctcagcctcccaggtagttgggattacaggcacctactgccccacccagctaatttttatgtttttagtagagacgggtttcaccatgttggccaggctagtcttgaactcccgctttcaggtgatccactagcctgtggtctatcctggaggatgtttgtgtgtgtgacaatgtatattcttcaacatcttagactccattttggatgctcccatcggaactatgtatccctgtgctggaactcaagtgaacactcagctcaaagtccattgctgttctctagaaatccagcccagttctcttggttaaatataaggtatgtgtagtaggcattgctttttctctttagaggcaaaactcaggagggttgccccttgatgaacaaggctaacctgcagagcctttgaagaaaggaactggagatggtccttttaggggtttatgttctggattctagaaaacaggcaaacagggccaataaatgcatctttattgttgtggccattttaacctggtcaaggaagatttcaacaaaaaacccagagtgctggagcaagaagatcccatgctgtgaccctccaaagggaagcgctttctgtttgttttctcttaaacaaagtgcctccctttagagtgttaccgtttgggaaaagccacgttgaagatgatgctgatcttggtaatacatttgcagaccatgcttgtaatcagacttggatgatgttgggagtctgtttttttgtttgtttgtttggttggtttttttgtttgttaggtttttgttttttgttttggtgtgtgtgttttgttttgtgtttttttttttttctaagacaaggtctctgttgcccaggagagactagagaagcactttttaagataggcctgttgggctcagatggtccttttatgggatacagtcttgctctgtgacccagactggagtgcagtggcgcgatcttggctcaatgcaacctccacctcccgggttcgagtgattctcctgcctcagcttcctgggtagctgggattacagatgcctgacatcacactcggctaatatttgtatttttcttttttattcattcattcatttttgagatggagtgttgctgtcacccagcctggagggcagtggcatgatcccggctgactccaacctctgcctctcaggttcaagccattctcctgcctcagtctcctgagtaggtggaattacaggcacccaccactacaaccagctactttttgattttgattttttttttttttttttttttttagtaaaggtggggtttcaccatgttggccaggctagtctcaaacccctgacctcaagtgagccgctggcctcggcctcccaaagtgctgagaatacaggcgtgagccaccgggcacagccatcagcaccttttactttatggaaatttttctggcactggtatagaacctcacgtggggtcaggtggagttgaggggacctcagtgtccctgcagatgggatgagcaagagcacggaggtggagtgcatggggcttcagtgtttattggggaaatgaagctgaaatctgggtgcatgaccaggagataaatgcatgagacggcggtctcactatgctgccctggctgaagtgggcttagatcctcctgcctctgcccctccccagtccttggtagatgggaccacatgtgaatattaaccccccatgcacagacaagaagaaagtaaggactgttctttggttcatacctgaccccagttaaacttgtattttagataaacaatgtatttgagatgtacttgaacaacaaacgatttgctgttcaggtgtgggcatctttgttttgtttttttttttcctaattttaaatatgggactagtgtgcatatggtggctcttgtctgtaattcctgcactttgtgaggctgagacaggaggatcacctgagatcagttgttcgagaccagcctggccaacatgaagccaggaggctgagctttcagtgagctgaaatcttctgctgcactccaccctgggcaacagagtgagactcagtctcaagaaagtaaaaaataggccgggcgcggtggcgcatgcctgtaatcccagcactttgggaggccgagacgggaggatcacctgaggtcaggagttcaagaccaacagggccaacatggcaaagcctcgtctctactaaaaatacaaaaattagctgggtgcaatggtgcacatctgtaattccagctactccggaggctgaggcaggagaatcccttgaacccaggaggaggagatttcagtgagctgaaatcaagccatggcattccagcctgggccagagagcaacattccgtctcaaaaataaatgaataaataaaataaataaaaataaatagataaatatgggacatcataaatttgggtgtcacctttgtgtagcagccagcgtaatctctgtcattccaatttttttttatgtgaactgccaaagcaagcacttgtgtaggaatttttcttcctgtgagcatacaatatatggaactttctttgacacagggtctcagaaatatatggtatatatttcgttatatatatacttatatataatataatcatatacacacaaaatactgttctaaatacagagaatactctgatataaccttgggtatttttttctttctttgtgtgtgtatgttttttatttgtttggctggtttttttttgtttttgttttttgttttttgttttttgtttttgtttttgttttgagacagagtctcactctgtcgccgaggctggagtgcagtgacaggatctcgggtcactgcaagctccgcctaccgggttcacgccattctcctgcctcagcctcctgagtagctgggaccacaggcacccaccaccacacctggctaatttttttttgtatttttagtagagacagggtttcgccatgttagccaggatgatctcgatctcctgacctcgtgatccacccgcctcggcctcccaaagtgctgggattacaggcgtcagccaccgcgcccggccagttggttatttttgagacaaggtctggctctatcacccaggctggagtgtagtggtgcgatcttggctcactgcaacctccacctcccacctaaacctgctgaattagtgtctacaggcatgcaccaccacacctggctcacttttgtgtttttcatacacatgggtttacaccatgttgctggggctggtctcaggaactcctgagctcaggtgatcctcccgtcttggccccctaatgtgctaggattagaggtgtgagccaacccaccccacccatacttacgtatttctgttcagattttattgagtttttatgaccaagcctatggtctatcctggagaatatttgtgtatgtgacaatgtatattcttcaacatcgtagactcgattttgggtgctcccatcgggactgtgtgtacctgtcctggaactcaagtgcacccttggctcataatccattgctcttctccagaaatcttaccaattctcctgcttaaatataagctacgtgtagtaggcattgttttttcttagcagatacgaaactcaggaagattgtcctatgataaacaaggctaacctgctgattgtttgaagcaaggaactggagatggtccttttaggggtttatgttttggattccagaaaacgtgtaaacagggccaatacgtgcatctttattttgtgtccagtttagcctggtcaacaaaaatgtcaacaaaaaacccagagtgctggagtaagaaggtctcgggctgtgactctccaaagggaagaattttctcttgtctaaaagaaaagaacgcacttccctttagagtgttaccgtgtgagaaaagcaatgctgaagttgatgctgatcttgcaaataactttgcagagcctgcttataatcagactttgacaatggtgggcgtctgtttttttttttctaagacaggatctctgttgcccaggctggagtatggtggcacttccaacctaggtctcttgggctcaaatggtcctcttttttgggacagagtcttgctctgtgacccaagctagaccacagtggcacgatcttggctcacggcaatctctgcctcccagtttcaagtgattcccctgcctcaacttcctgagtagctgggattataggtgtctgacaccatgactggctataattttcatttttcttatttatttatttttgagtctcgctgtctctcaggctggagtgcagtggcagcctttgcctcttgggttcaagcaattttcctgcctcagcctcccaagtagttggaattatatgtgtcaccatcatgccctttttgtttttttttagtagaaaatgggtttcaccacgttggccaggctagtctcaagcccctgacctcaagtgatcctcccgcctcagactcccaaagtgctgaaaatgcaggcgtgagccactgcaccgagccatcaacaccttctactccatggaaatgatactggcgctggtttatagaacctcacttggggtcgggcagatttaaaagggacctcaggctgggtgtggtggctgacgcctgtaatcccagcactttgggaggccgaggcgggtggatcacgaggtcaggagatcgagaccatcctggctaacatggtgaaaccctgtctctactaaaaatacaaaaaattagccaggcgtggtggcgggtgcctgtagtcccagctactcgggaggctgaggcaggagaatggtgtgaacccgggaggcggagcttgcagtgagccgagatggcaccactgcactccagcctgggcgacagagcaagactctgtctcaaaaaaataaataaataaataagggggtgggggacctcattgtcccttgcagatgggatgtgccctgcttagcaagagcacggaggtggagtgcatggctttgagttttcactggggcacggaggtggagtgcatggctttgagttttcactgggtaaatgcagctgaactcttggctgcacgaccaggtcatatgtgcaacgagacaggggtctcactatgctgcccaggctaaaatgggcttaggtccttttgcctccacctctccccagtccttagtagctgggactacatgtgaatattaaccatgcacaggcaagaggaaagaaaggaccgttctttggttcacacctagccgccagtcaaattagtattttagatgaagactgcatttgagacatacttgaacaacaaatgatttgctgtttaggtgtgggcatctttcttttttcctagttttaataatggcaccaggcagagtacagtggcccacgcctgtaattccagcactttgggaggctgagacaggaggatcacctgaggtcgggaatttgattccagcctggccaacatggtgcagccccatctctactaaaaatacaaaattagcccagcatggtggtggtatatgcttgtaatcccagctactctggaggctgaggcaggagagtcgcttgaagctggaaggctgatctttcaatgagctgagatcacgccactgcactcaagcctcggcaaaaagagtgagactccatctcaaaaacataaaaaataggccagacacggtggtccactcctgtaatcccagcactttgagaggccaggacaggcggatctcctcaggtcaggagtccaagactagctgggcaaacaaggcaaaacctcgtctatactaaaattaggaaaaatggctgggaacagtggtggacacctgtaatctcagctacttgggaggccacggcaagagaatctcttgaacctgggaaaaggagattgcagtgagacgaaatcacaccattgtactccatcctgggtgacagagtgagattctgtttcaaaaattaaataaataggccgagcacagtgactcatgcctgtaatcccagaactttgggaggccgaggtggcggatcacctgaggtcgggagttcaagaccagcctaaccaacacgtagaaaccccatctctactaaaaatacaaaattagccgggcatggtggcgcatgcctgtaatcccagctgctcgggaggttgaggcaagagaatcacttgaaccccagggggcggaggttgtggtgagccgagattgtgccattgtattccagcctgggcaacgagtgaaactctgtctctaaataaataaataaaactattaaataaacattaaacgttaaaaaataaaaatagataaatatgagatcatcatgaatttgagtgtcacctttgcgcagggcccatggtaatctttgtcattccaattttttcatgcgtgctgccaaagctagcacttgtgtgtaggaagtattcttcctgtgagcatacaatatatggaagtttcttttattattattattttttatgtttttgcgactgagttttgctcttgtcgcataggctgaagtgcaatggtgtgatctgggctccctgcgatgtccacctcttgggttaaagcgactctcctacctcagcctcctgagtagctgggattacaggcatacacttccagggctagctaatttgttgtattttagtagacgggatttctccatgttggtcaggctggtctcaaactcccgacttcaggtgatctgcccaccttggctttccaaagtactgggattgcagacagccaccgcggctggccttcatatattcttatatatataatatcatgtacacacaaaagactcttttacaccctgagaatactcttatatcactttgggcatttttttgttggtgtgtgcattttttgtttgttcgttcgtttgtttttgagacaagatctggccctgtcacctatgctggagtgcagtggtgtgatctcggctcccggcaacctcaacctcccacctcagcctcctgaattagtgtctacaggcatgcacctctatacctggctaacttttgtatttttacagatgaggttttaccatgtttcccaggctggtgtctaactcctgagaatataaggtatatgtagtaggcgttgctttttctctttgaagacaaaacccaggacagttgtccctcgatgaacaaggctaacctgctgaacgtttgaagcaaggaactggagatggtctttgtatcggtttatgttctagattccagaaaatatgcaaacaggaccaataaatgcatctttatttttgtgtccattttgaccaggtcaaggaaaatttcaacaagaaacccagagtgccggagcaagaagatctcaagctgtgagtctacaaagggaagccctttctgttgtctaaaagaaaagaaagtgcttctctttggtgggttacggtttgagaaaagcaacgttgaagttgatgctgatttcggtaatacatttgcagagcatgcttatcacacttggacgatggtggggttctgttttggttttgcttttttattctaaggctctgtgttgctcatgctggagtgcagtgacatgtccaatatatctcttggcttcaaatggtcagcctgggcaacacagggaaattctgtctcaaaaaataaacaaatgaataaaaatacaaaataaagccgggcatggtggctcatgcctgtaatcccagcactttgggaggccgatgcaggtagatcatctcaggtcaggagtttgagaccagtctgaccaacgtggtgaaaatccgtctctactaaaaatacaataacaacaaaaattagcccagtgtggtggtgggcacctgtaatcccagctacttaggaggctgaggcaggagaattgcttgaacccgggaggcagaggctgcagtgagccgagattgtgccacagcatccagccaggatgacagagtgagattccgtctgaaaaaaaaaaaaaaaaaaaaaagctgggcgctgtggctcacgcctgtaatcccaccactttgaaaggccgaggcgggtggatcacgaggtcaggagatcgagaccatcctggctaacacggtgaaaccccatctctatttaaaaatacaaaaaattagcgaggcgtggtggtgggtgcctgtagtcccagctacccgggaggctaaggcttgagaatggcttgaacccaggaggcggagcttgcagtgagccgagatcgtgccattgcactctagcctcggcaacagagcaagactccgtcaaaaagaaacaaaaacaaaaacaaaaaaaagaaccctacagtactggagcaagaagacctcatgctgtgaccctctagatggaagcactgtctgttgtctaagaaaagatcgtgcatccctttagagtgttactgtttgagaaaagcaacgttgaagatgctgctgatcttggtaatacatttgcagagcgtgcttatcatcagacttgcatgatgttggggttctctttggtttgtttttttccaagacaggttccctgttgcccaggcgggagtgggtggcacctccaaccgagatctcttgggctcaagtggtgatctttttatttttgattttttgagatgcgctctcattccgtttcccaggctggagtgcagcggcaggatccctgttgaccggaaactccgcctcccagcttccggcgattctcccacctcagcctgccgaatagttgggaatagagatgcccgccatcgtgtcctgctagttattatttttattgttgttgttgttgttgagatggagtttcactcttgatgtccaggctggagtgcagtgttgcaatttaggctcactgcaacctccacctcctgggttcaagcgattctcctgccgcagcctcctgggtagctgggattacaggtgcctactgccccacccagctaatttttgtgttttgaatagagactgggtttcaccatgttgggcaggctggtctcaaactcccgacctcaggtgatccaccagccttggcctcctaaagtgctgggattacaggcgtgagccaccgcccctaatctcacgtggtcctctagagtcagcctagactctggtctatcctggaggatgtttgtgtgtgagacaatgtatattcttcaacatcagcccaattctcttagctaaatgtaaggtatgagtagtaggtattcctttttctctttggggacaaaactcaggacgatcgccccttgatgaacaaggctaacctgctgagcctttgaagcaaggaattggagatggtcctttcaggggtttatgttctggattccataaaacatgtaaacagggccaataaatgcatttttatttttgtatccgttttaacctggtcaaggaaaattccaacaagaaacccagagtgctggagcaagaagatcccatgctgtgaccctctagaggaagcactttctgtttgttgtctgagaaaaaacaaagtgcttccctttagagtgttaccgtttgggaaaagcagtgttgaagttgatgctgatgttggtaatatatttgcatgcttattatcagacttggatgatgttggggttctgttttgtttttgttttctaagacagggtctctgtggcccaggctggagtacagaggcacttccaacctaggtctcttgggctcatatggtcctttttgggacagtcttcctctgtgacccaggctggagtgcagtggcacgatcttggctcactgcaatctccacctcgcgggttcaagctattctcctgcctcagcttcctgaatagctgggattgcaggggcccgacatcacacttggctaatatttgtatttttcttttttattcatttatttatttttgagatggagtctcgtttccccagctggagagcggtggcatgatcccgactgactccaacctctgcctctcaggttcaagcaattctcctgcctcagcctctgaagtagctgaaactacaggtggccgccaccacgcctggctacgttttgaatttttttttttttttttttcagtagagatggggcttaccatgttggccaggctggtctcaaacccctgacctcaagtgagccactcaccttggcctccgaaaatgctgagaatacaggcatgagccaccaccgcgcgcctcccaaaggcgtgagccatggtgcgtggccatcaacacctcttactttatggaaatttttctggcactggtatagaacctcacatggggtcaggtggagttgaggggacctcagtgtccctgcagatgggatgagcaagagcacggaggtggagtgcatggggcttcagtgtgtattggggaaatgaagctgaaatcttgggtgcatgaccaggagataaatgcatgagacgggggtctcactatgctgccctggctaaagtggtcttagatcctcctgcctctgcccctcccaggccttgttagatgggactacatgtaaatattaacccatgcacaggcaggaagaaagtaaggaccattttttggttcgtcccggccctcagttaaacttgtgttttagataaacaatgtatttgagatgtgcttaaacaataaatgatacgctatttaggtgtgggcatctttgtttccccctaattttaatgatgggactagtccaggtatggtggctcctgcctataattccagcactttgggaggccgagacaggaggatcacctgaggtcagttgttcgagaccggcctggccaacatggtgaaaccccgtccatactaaaaatacaaaaatcagccaggcctggttgcacacacctgtaatcccagctactcgggaggctgaggcaggagactcgcttgaagccaggaggctgagctttcagtgagctgagattgcgccactgcattccagcctgggcaactgagtgagtctcagtgtcaacaaagtaaataatagtctaggcacagcggcacacgcctgtaatcccagcactttaggaggctaagacgggaggatcacctgaggtcaggagttcaagaccaacggggccaacgtggcaaagccttgtctctactaaaactacaaaaattagctgggtgcggtggtgcacatctgtgattccagctactcgggaggccaagacaggagaaccacttgaacccaggaggaggcgatttcagtgagctgtaatgaagccatggcattccagcctgggccacagagcaagattccgtctcaaaaataaataaaacaaataaaaatacgtagataaatacgggaccgtcgtgaatttgagtgtcacctttgtggagcagccacggtaatctctgtcattccaattttttttatgtgcactaccaaagcaagaacttgtgtaggaattattcttcctgtgagtatgcgatgtatggaactttccttgagacagggtctcaaaaatatatcatgtatattttatatattcttatcatatataatataatcatgtacacacaaaatactcttctaaatacagagaatactctgatatcaccttgcgtattttttgtttgcatgtgtctgtgtttggttgttttttttttgtcatatttttgtatccctacttatatatttatttttaattttattattatactttaagttctagggtacatgtgcacaacgtgcaggttagttacatatgtatacatgtgccatgctggtgtgctgcacccattaactcatcatttagcattaggtatatctcctaatgctatccctccccgctacccccacccaacaacagtccccggtgtgtgatgttccccttcctgtgtccatgtgttctcattgttcagttcccacctatgagtgagaacatgcggtgtttggttttttgtccttgcgatagtttgctgagaatgatggtttccagtttcatccatgtccctacaaaggggttggttatttttgagacaaggtctgactctatcgcccaggctggagtgtagtggtgccatctcggctcactgcaacctccacctcccacctaatcctgctgaattagtgtctgcaggcatgcacaaccacatctggctcacttttgtattttttatacacatgggtttacaccatgttgcaggcgctggtctcaaactccctcccaagctcaggtgatcctctgtctcagcctcctaaagtgctgggattagaggtgtgagccaccacaccccactggtatttgtgtgttcctgttcaaattttattgaggagtttttataaccaagcctgtggtccatcctggaggatgtttgtgtgcatgacaatgtatattcttcaacatcgtagactcgatgttggatgctcccatcgggactgtgtgtccctgtactggaactcgagtgaacacttggctctaagttcattgctgttttctagaaatccagcccaattctcttggttaaatataaggtgcacgtagtaggcattgctttttctttctggagacaaaactcaggaggattgccccttgatgaacaaagctaacctgctgagactttgaagcaaggaactggagatggtccttttaagggtttatattctggattccagaaaatgtgcaaacagggccaataaatgcatctttatttttgtgtccattttaacctagtcaaagaaaattacaacaaaaaatccacagtgctggagcaagaagatctcatgatgtgaccatctggaggtaagaagcactttgtgttttgtgaaagaaagtgcttcctttcagagggttactctttgagaaaagcagcattgaagttgatgctgatcttggtaatacatttgaagagcatgcttatcatcagacttggatgatcttggggttttgtttttttctaagacagggtgtctgtagcccaggctcgagtgcggtggcacttccaacctagatctcttgggctcaacaagtagccctctttttcggacagagtctcgcgctgtgaccctagctggagtgcagtggcaggaacttggctcactgccacctctgcctcctgggttcaagcaattctcctgcctcagcctcccgagcagggttataggcatgtgccaccacacctggctaatttttgcattttattatcgattgattgattgattgttgagacagagtctcactctgttgcccaggctgtagtgcagtggtgtgatctcggctcactgcaacctccacctcccacctcagccttctgaatacctgtctacaggcatgcaccaccacacctcgccaacttttgtgttttttgtacagatgaggtttcaccatgttgcccaggctggtcttgaacccctgagctcaagtgatcctcccacctcggcctcctaaagtgtgagtcactatgtcccgccctacttgtgtgtttctgcttacattttattgaggcgattttttttttttttttgagacggagtcttggtctgttacctaggctggagcgcagtggcgcgatcttggctcactgcaagctccgcctcccaggttcatgccattctcctgcctcagcctcctgagtagctgggactacaggcgcccaccaccacgcccggctaatttttttgtatttttagtagagatggagtttcaccttgttagccaggatggtctagatctcctgaccttgtgatcctcccgcctcggcctcccaaagtgctgggattacaggcatgagcgaccgtattgaggcgcttttacaacatagcctgtggtctatcctggggaatgtttgtgtgtgtgacaatgtatattcttagacatcttagattccattttggatgctcccatcggtactatgtgttcctatataggaactcaagtgaacacttggcttaaaatccattgctcttgtctagaaatttagcccagttatcttggttaaagataaggtgtgtctggtaggcattgatttttctttccggagaaaaaacttaggaggatttcctcttgatgaacaaggctagcctgctgagcctttgaggcatgggacctggagatgatcctgtgaggggtttatgtttttggattcaggaaacacaccagcaggacaaataattgcatctttatttttgtgtctattttcaccaggctaaggaagattccaacaacatatccatggtgctgaagtaagaagatctcgtgctgtgaccctctagagggaagcactttctgttgaaagaaaagaacatgcatcctttcagagggttactctttgagaagagcaacgtttagtttgatgttgatcttggtagtacatttgcagagcatgcttttatcatcagacttggctgatggtggtgttctgttttttgttgttgttttctacaacaggatgtctgttgcccaggctagggtgtggtggcacttacaacctagatctctagggctcaaatggtcctcttatttggggcagagtcttgctctgtgatccaggctggagtgcagtggcaggaactctgctcactgcaacctccgcctcccgggttcaagtgattttcctgccttggttttctgagtaggtgggattacaggcgcacaccaccacacccagctagtatttgtagttttctttattattcttttttttattttaatttttgagacgaagtctcgctgttgcctacggtggagtgcagtggcgtgatctcggctctctacaacgtctgcctcccaggttcaagcaattctgctgcctcagcctcccgagtagctggaatcaacaggaacacaccaccatgcctggctactttttggatttttttttagtagagacggagtttcaccatgttggccaggctggtctcaaactcctgacctcatgtgagccacccacctcggccttccaaagtgctggaattacaggcatgaaccacgacgtctggcctaatttttgtatttttagaagagacagggtttcaccatgttggccaggctggtctcagctcctgacctcaagtgatcctccccctcggcctcccaaagtgctgggattacaggcgtgagccacctcgcccagcctcaagtggtcctcttgactcagcctcccatgtagttgggactacatggggcgtgccaccacacttggctaagtttttaatttttcatacagatatgatctctgttgctcaggaaggtctcaacacctgagctcaaggattccacaggcgtgagccacattctcctgctgacccttttcaaagatagttgacatggccaggcatcatggggcacacagtcccagccaccgcagatcccggggtgggagggtcctttgatttccagactattccatgcactgatcacaccttgtttttttgtttgtttgtttgtttgtttgtttgtttgacagagtctcagtttgttgcctggcgggagtgcaatgatgtgatctcgggtgactgcaacctctgcctccaaggttcaagtgattctcctgcctcaccctccaaagtagctgcggttacaggcatgcaccaccacacccagctcagtttttgcatttggtagagacaggttttcaccatgttggtcaggctggtctcgaactcctgatttcaggtgatccacctgcctcagcctcccaaagagctgggattataggcgttagcctatgcgcccggtctgtatttcctaattttaaatatgggacccatggtgaatttgggtgtcactgtgtacaggggacatgggaatctctgtcattccaatttttttaatgcatgctgttctgtgtaggaattattcttcctgtgagcaaacaacatagagagctttctttttttgacaccgggtctcaaaaatatatcatatacattttattataatgtctgatattgataatataatcatacacacacaaaatactcttctgtacacagagaatactgatatcactttggggtttttttgtttgcgtgcgttttttgggattttggggtgtttttttttttttttttgagacaacatctggctctgttgcccatgctggagtgcagtggtgcaattggctccctgcaacctccacctcccacctcccacttcagcctcctaaagagctgaatacaggcatgcaccaccacacctgactaacttttgtattttttgtacacacagggtttaccatgtttcccaggctggactggaactccagagctcaagtgatcctcccgacttggcctccttaagtactgcagttagaggtatgagccgccgagacccaccgtacttgtgtttttctattcaaatattattgaggagcttttatggcctaacctgtggtctatcctggaggttgtttgtgcgtacaatacatagtcttcaatatcttttttttttttttcattttttgagagggagtttcgctcctgtcacctaggctggagtgcaatgacatgatctcagttcactgcaacctccgcctcctgggttcaagtgattctcctgcctcagcctcctgagtagctgggattacaggcacccgccaccatgcctagctaagtttgtattttcagtagagacgggcttctccatgttggtcaggctgggctcagactcctgacctcaggtgatccgcccgcctcggcctcccaaagtgccgggattacaggcgtgagccaccgcgcccagtcatcatatattcttatcatatatatagtaggatgtttgtgtatataacaatgtacattttcaacattgtagattccattttggatgctcccattgggactgtgtgtccctgtgctggaactcaagtgaacacttggctcaaaatccattgctgttctctagaaatccagcccaattctcttggttaaatataaggtatgtgtagtaggcattgctctttctctttagagacaaagctcaggattgccccttgatgaacaaggctaacctgctgattctttgaagcaaggaactggagatggtccttttagtggtttatgttctggattccagaaaacatgcaaacagggccaatacatgcatctttacttttgtgtccattttaacccggtgaaggaaaattccaacaaaaaacccacaatgctggagcaagatctcaggctgtgaccctctagagggaagcgctttctgttggctaaaagaaaagaaagcgcttcccttcagagtgttaacgctttgagaaaagcaacgttgatcttggtaatacacttgcagagaatgcttataatcaaccatggaaggtggtggggttttgtgtttgtttgttttgttttgttttctaagacagggtgtctgttgcccaggctggagtgtggcggcccctccaacctagatctcttgggttcaagtggccctcttttttgggacagagtcttgctctgtgaccctgccctggctggagtgtcctgtcaggatctccactcactgcaacctctgcctcctggggtcaagggattctcctgcctcagcctcccgagcagctgggattacaggtatgtgccaccacacctggcttatttatttatttatttatgagacagagtcttgctgtgtcatccatgctggagagcagtggtgcaatctcggctctctgcaacctccacctcccacctcagtctcctgaattagtatctacaggcatgtaccaccatacctggctaacttttgtatttttacagatgaggttttaccatgtttcccgggctggtgtctaactcctgagctcaagtgatcctcctgccttggcctacgtaagtgctgcggttagaggtgtgagccaccgcgccccacctgcccttgtgtatctctgttcaaatgttactgagaagcatttacgggataatgcccggaggatgtttgtgtgtgtgacagtgtacattcttcaacatcttagattccattttggatgctcccctcgggactgtgtgtctctgtcctggaattcaagtgaacacctggctctccatccattgctgttctctagaaatccagcccaattctcttggttaaatataaggtaggtgtagtaggcattgctttttctctttggggacaaaactcaggaggattgccccttgatgaacaaggctaacctgctgattctttgaagcaaagaactggagatggtccttttaggggtttttattcaggattccagaaaacatgcaaacagggccaaaaattgcatctttatttttgtgtccattttgacctggtcaaggaaaatttcaacaagaaacccagagtgccggagcaagaagatctcaagctgtgactgcaaagggaagccctttctgttgtctgaaagaagagaaagcgcttccctttgctggattacggtttgagaaaaacaacactgaagctgatgccgatcgtggtaatacatttgcagagcatgcttatcatcaggcttggacaatgccggggttctgttttcggttttgcttttttattctaagacaggatctctgttgcccaggctggagtgcagtgacatgtccaacccaggtctcttgaattcaaatggtcctttttagggggcagagtctttctctgtcacccaggctgatatgcagtgaggcgatctcggctcactgcaacctctgcctcccaggttcaagcaattctcctgcctcggcttcccaagcagctgagattacaggcgttcatcaccatacctggatgatatttgtattttttaaaatttatttatttatttatttttgagacggagtctcgctgtcacccagtctggagggcagtggcacaatctcggctcactgcaacctctgcctccccggttcaagcaattcttctgcctcagcctcctgagtagctggaattacagaagcacaccaccgcacctagttactttttgtatattttttttaagtagagactggatttcaccgtgttggctaggctggtctcaaattcctgacctcaagtgatccacccacctctgactcccaaatttctgggatcacaggtatgcgcccccatgcctggcctaatttttgtatttttagcagagacgtggtttcaccatgttggccaggctgaactcagctcctgaccttaggtgatctgcccgcctgggcctcccaaagtgctgagaatacaggcgtgagccaccgtgcctggccattaacaccttttggtccacggaaattattctggcactggtttatagaacctcgcttggggtcaggtagagttgaaggggaccccaatgtccttgcaggtgggatgtgcactgcttagcaagaacacggaggtggaatgcatggggtttgagtttttattggagaaataaagccaaaatcttgggtgcatgaccaggtcgtatatgcaacaatacgggcgtctcactatgccgcccaggctaatgtgggcttagatcctcctgcctctgcccctccccagtccttagtagctgggactacatgtgaatattaactcacgtacaggaagaggaaagtaaggactgttctttgattcacgtcccacccccagttaaatttgtattttagataaacaatgtatttgagatgtacttgaacaacaaatgatttgctgtttagatgtgagcatctttttttgctcctgattttaaacataggacaaggtcaggtatggtggctcacgcctgtaattccatcattttggtaggcagagacaggaggatcacctgaggtcagctgcttgagaccagcctggccaacatggtgaaaccccatctgtactaaaaatacaaaaattagccatgcgtggttgtgctgcacgcctgtaatcccagctactcaggaggatgaggcaggagaatcgcttgaagccgggaggcagaggttgcagtgagctgagatcgcgccagtgaactacagcctgggcaaaagaataagattcaatctcaaaaaaataaaaaataggccaggcacggtggcacacacctgtaatgctagcacttttggaggtcgagacgggggcatcacctcaggtcaggagttgaagaccagctgcggcatcacggcaaagcctcatctctacgaaaaatacaaaaattagccaggtgcagtggcaggtgcctgtaataccagctactcgggagaccaaggcaggagaatcgttccaactgggcggcagaggttgcagtgagccaagatcgtgccactgcactgcagcctgtcgacagagtaagacttggtctaaaaaaaaaaaataaataaataaataaaagataaatatggaaccatcatgaatttgggtgtcacctctgtgtgggggccagggtaatctctgtcaatccaatttttttttatgtgcaccagcaaagcaagcacttatgtttaggtattattcttcctgtgagcatacaatatgtagatctttattttctttgagacatggtctcaaaaatgtatgatgtggctgggcacagtggctcaagcctgtaatcccagcactttgggaggctgaggcgtgtggatcacccgaggtcaggagttcaagaccagcctggccaacatggtgaaaatccgtctctacgataaatacatatatatatatatgtatatatgccgggcatggtggcaggtacgggtaatcccagctacttgggagcctgaggcaggagaatcgcttgaacctgggaggtagaggttactcatatcactatgagattgttttttgttcttgtgtgtgtggtttttgtttgtttttgagacaaggtctggctctgtcacccaggcaaaagtgtagtagtgcgatctcggcttactgtaacctccatctcccacctatgcgtcctgaattagtgtgtctacaggcatgcaccaccacagtgggctaccttttttttttgagagggaattttgctcttgttgcacaggctggagtacaatggcaagatttcagatcactgcaacctccgccttccgggttcatgtgattctcctgcctcagcctcccaagtagctgcgattacaggcatgcaccatcacacttggctaattttgtattttgagtagatacaggtttccccatgcttgtcaggctggtctccaactcctgacctctagtgatccacctgcctcggactcccaaattgctgggattacaggcatgagctaccacacccagccacctggctaacttttgtagtttttctacagactacaaaatggtttcaccattttacctgagactacaaaatggtttcaccattttacctgagactacaaaatggtttcaccattttacctgagctggtctccaacacctgagctaaagtgatcctcctgcctcggcctcataaaatgttgggattagaggtgtgagccaccgtgcctcacccgtacttgtgtatttctttatttttattgatttatttattttgagacagagtttcactcttgttgcccaagctggagtgcaatggcacaatctcggctcaatgcaacctccttctcttaggttcaagcgattctcctgcctcagcttcccgggtagctgggattaaaggcgtccaccaccacacccagctaatttttgtgtttttagtagagacagggtttcagcatgttggccagactggtctcaaactcctaacctcaggtaatccacctgcctcagccttccaaactgctgggattacaggcatgagccactgcgcctagcctcaagtggtcctcttaagtcagcctaaactgtggtctatcctggaggatgcttgtgtgtgtgacaatttatattcttcaacgtcttagattctattttggaggctcccaaggggattgtgtgtccctgtgctggaactcaagtgaacacttggctgtacatccattgctgttctctagaaattcagcccaattctcttggttaaagataaggtatgtgtagtaggcattgctttttctttccagagacaaaactcaggaggattgccccttgatgagcaaggctaacctgctgattctttgaagcaaagaaccagagatggtccttttaggggtttatgttctggattccagaaaacaggcaaacaggaccaataaatatatttttatttttctatccactttaacctggtcaaggaaaattccaacaagaaacccagagtgctggagtgagaagatcccatgctgtgaccctctagagggaagcactttctgttgtctgaaagaaaccaaagcgcttccctttggagcgttacggtttgagaaactcaatgttgaagttgatgctgacttcagtaatacatttgtagaggatgcttatcatcagacttggatgatatcggggttctgtgcttttttttttttttttctcctaagacaaaatctgtattttccaggctggagtccataagcacttccaacctaggtctcttgcgctcagatagtcctcttttttgggacagagtcttgctctgtgacccaggctggagtgcagtggcgtgatctcggctcactgcaacctctgtctcctgggctcaagcaattctccttcctgagcttcctgaggagctgggattacaggcgcctgacatcatccttggctaacatttgtatttttcttttttattcatgtatttatttacttttcagatggagtctcgctgtcgaccaggctagagggcagtggcacgatcccggctgactacaacctgtacctctcaggttcaagcaattctcctgcctcagcctctggagtagctggaattacaggaacacaccaccaggcccggctactttttgtattattattattattattattttttttttttttcactaaagagggggtttcaccatgttgtccagagaatacaagcatgagccactgcgcagccatcaacaccttttactgcatggaaattattctggcactggtatagaacctcacatggggtcaggtggagttgaggggacctcagtgtccctgcagatgggatgagcaagagcacggaggtggagtgcatggggcttcagtgtttattggggaaatgaagctgaaatcttgggtgcatgaccaggaaataaatgcatgagacaggggtctcactgtgccgccctggctaaagtggtcttagatcctcctgcctctgcccctccccagtcctaggtagatgggactacatgtgaatattaacccatgcacagacaagaagaaagtaaggactgttattttgttcgtacccagcccccagttaaatttatcatatatataatatatcatatatataacataatcatatacacacaaaatgctgatttgaatacagagaatactctgatatcactttgggtattttttggtttgtttctgtgtgtgtgtgttttatttgtttggttggttatttttgagacaaggtctggctctatcacccaggctggagtgtagtggtgcgttctcagctcactgcaacctccgccttccacctaagcctgctgcattagtgtctacaggcatgcaccaccacacccggctcacttttgtattttttgtacacatggggttacaccatgttgccggggctggtctcgaactcctgacctcaggtgattctcccgtcttggcctcctaaagtgctagaattagaggtgtgagccaccgtgccccacctgtacttgtgtatttatgttaaaattgtgttaaggagtttttatgaccaagcctgtgatctattctggagaatatttgtgcgtatgacaatgtatattcttcaacatcgtagattccattttggatgctcccactgggactgtgtgcctatactggaactcaagtgaacacttggctcaaaatccattgctgttctctagaaatccagcccaattctcttggttaaatataaggtatgtgtagtaggcattgctttttctttctagagacaaaactcaggaggattgccccttgatgaacaaggtaacctgctgattctttgaaacaagaaactggagatggttcctttaggggtttatgttctggattccaggaaacatgcaaacagggcccacaaatgcatctttatgtttgtgtccattttaacctggtcgaagaacattccaacaaaaaatccaccatgcaccgagcaagaatatctcaggctgtgaccatctggaggtaagaagcactttctgttttgtgaaagaaaagaaagtgcttcctttcagagggttactctttgagaaaagcaacgttgaagttgatgctgatcttggtaatacatttggagagcatgcttatcatcagacgtggatgacggttgggttttgtttttgttttattttttatcttaggcagggtctctgttgcccaggctggagtgtgttggcacttccaacctagatctcttggtcttaaatggtcctctttttggggggcggagtctcactctgacccaggctggagtgcaatggcaggaactcccctcactgcaacctccacctcccgggttcaagcgattctcctgcctcagttttccgagtcgctaggattacaggctcactcctccacacctggctaatatttgtagttttctttattattcatttatttatgtgtttttgagaaggagtctcgctgtcgcccaggctggagtgcagctgcacaatctcagctcactgcaacttctgccactggagtaactgggatttcaggtgcgtgccaccacacttggccaattttttatgtgtgtatttttagacccggggttttcccatgttggccaggctggtctggaactcctgacctcaggtgacccatgcacctcggcctcccagagtgctgggattacaggcatcagccaccgcacccggccctgtctctgacttttgcgaactgaggaagtaaccttttgaaatttactctgaagtgtgaatgattttagcatattttcaaccaccaacattctagttcaggagattttcatcaccccaaagaggcttattcccatttgcagtcagttcccaccccactcttccacccagaccgtgacaaacactttgcatctctctagctctggatctgcctcttgtgggcatgtcacatagatcagttttgaataggtggcctgttgtgaccactgtaattgaggataatgggttggtcctggttgtctgcagtgtgaatcttaccactgaagggtggtccctggatggaagcaggaggctgggagaactgggcggaacatcctttgggaatggagtcgggcgggcagaccctgatgcctgggaagctcacaagggtggaagaccacatcttcctccctgagaactgcaaggtgaccctcctggggtactggaaggagtgaaggcctctggactgggaacaccagggcattgcaccggtgcaggcaggatgagccaaggggaacggagagccaggcatcgctaactggcgacaatttgggtttgatctggacggagtctgtgtcttctggtagagagaacccctgggattttcgctctgctcctggctgtctttcagtcatggaatctgatgacaaagactcccgcccagagccaagacatttggtttctggaccccagtggtcctttctgcctggacttgggatcttttggggaagtttgggatctggcagggcatctgcataatccatagaaatccctgagagtcccttccctttgctgacatctccatgttcctacctattagcttccaaaggagactcctatctgaattgccgaaggcagcttcccaggccagggatacccagttaaatttgtatttcagatcaatagtatatttcagatgtacttgaacaagaaatgatttgctgtttaggtgtgggcatttgtatttccccctttttttttttttttttttttttttgacagagttttgctcttcttacccaggctggaatgcaatggcacaatcttgactcactgcaacctccacctcccaggttcaagcgattctcctgcctcagcagcccgagtagctgggattacaggcatgcgccaccacacccggctcagtttttgcatttagtggagatgggggttcaccatgttagccaggctggtctcaaactcctgacctcaagtgatttccctgcatcggcctcccaaagtgctgggattataggcatgagcctccacgcctagcctcaagtggtcctcttgagtcaacctagactacagtctatgctagagaatgtttgtgtgtgtgacaatgtatgttcttgaacatcatagattccactttggatgctcctgtcgggactgtgtgtccctgtgctggaactcaagtgagagttggctgaaaatccattgctgttctctagaaatccagcccaagtctcttggttagagataaggtatgtctagtgggcattgctttttctttttggggacaaaactcagaaggattgccccttgatgaacaaggctaacctgctgattctttgaaggaaggaactggagatggtcttttaggggtttatattctggattccagaaaacttgcaaacagggccaatacatgcatctttatatttgtgtccgttttgaactggttaaggaaaatttcaacaagaaacccagagtgccggagcaagaagatctcaagctgtgggtctgcaaagggaagccctttctgttgtctaaaagaagagaaagcgcttccctttgctggattacggtttgagaaagcgacgttgaagttgatgcatttgcagagcatgcttatcatcaggcttggacaatggcggggttctgttttggttttgctttttcattctaagacaggatctctgttgcccaggctggagtgcggtggcagtggcatgtccaacctagccctcttggattcaaatggtccttttttgcaagcaaagtctctctctctcacccaggctggagtgcagtgatgtgatctcggctcgccgcaacccccgcctcctgggttcaagcgattctcctgcttcagcttcccaagtagctgagattacaggcacccatcaccacacctggataatatttgtatttttaaaaattcatttatttatttatgagacggagtctcgctgtcacccatgctggagggcagtgacacgatctcggctcactgcaatctctgcctcctgggttcaagcaattcttcctcagcctcctgactagctggaattacaggagcacaccaccgcacctggctactttttgtattttttttttagtagaaatgggatttcaccatgttggttagactggtctcaaactcctgacctcaagtcatccgcccacctctgactctttctgggattgcaggtatgcgcccccacgcctggcctaatttttgaatgtttagcagagatggggtttcaccatgttggccaggctgaactcagctcctgaccttaggtgatctgcctgcctcggcctcccaaagtgctgagaatacaggcgtgagccaccgcgcctggccatcaacaccttttaccccacagaaattattctggcactggtttatggaacttcacttggggtcaggtagaggtgaaggggaccccaatgtcccttgcagatgggatgtgtactgctcagcaagagcatggaggtggagtgcatggggtttgagttttcattggggaaatgaagctgaaatcttgggtgcatgaccaggtcgtatatgcaacgagacgggcgtctcactatgccgcccaagctaaagtgggcttagatcctcctgcctctggccctccccagtccttagtagctgggactacatgtgaatattaactcatgtacaggaagaggaaagtaaggactgttctttgattcatgccccacccccacttaaatttctatttcagataaacaatgtatttgagatgtacttgaacaacaaatgatttgctgtttaggtgtgggcatctttttttgttcctaattttaagtataggacaaggctgggtaccacggctcacacctgtgattccatcattttgggaggccaagacaggaggatcacctgaggtcagttgtttgagaccagcctggccaacatggtgaatccccatctctactaaaaatacaaaacttagcccagtgtggtggtggtacacgcctgtaatcccagctactcaggaggctgaggcaggagaatcacaggaagccgggaagctgagctctcagtgagctgagatcgcaccactgaactccagcctaggcaacagtgagactcaatctcaaaaaaataaaaaataggccgggtgcggtggcacacgcttgtaatcccagcactttgggaggtcgagacgggtggatcacctcaggtcagagttcaagagcagccccgccatcaagacaaaacctcctctctactaaaaatgcaaaatatagctaggcgtggtggtacacacctgtagtctcagctacgtgggaggcggcagcaggagaatctcttgaacccgtgagaaggagattgcagtgagctaaaatcacaccattgcactgcagcctgggcgactccatctcaaaaaataaatacataaataaataaatacataaatacataaaaaataacccagagtactggagcaagaagatctcaggcagtgaccctctagatggaagcactgtctgttgtctaagaaaagatcgtgcatccttttagagtgttactgtttgagaaaatcaacgttgaagatgctgctgatcttggtaacacatttgcagagcgtgcttatcatcagacgtgcatgatgttggggttctgtttgttttgttttttttttccaagacagtgtctctgttgcccagactagagtgggtggcacctccaaccgagatctcttgggctcaagtggtcctctttttattttttgattttttgagacccactctggtttcactgggagtgcagtagcagaatctctgttgaccggaaactccacctctcaggttccagtgtttctaccacctcagcctgccgaatcattgggaattcagttgcctgccatcaggtcttgctaattattattgtttttttgttttttttttttgaggcggagtttcgctcttgttgcccaggctggagggcaatagcgcgatctcggctcaccgcaacctcggcctcccgggttcaagtgattctcctgcctcagcctcccagatagctggaattacaggtgcctaccaccccacccagctaatttttgtgttttcagtagagatggggtttcaccatgttgggcaggctggtctcaaactcctgacctcaggtgatccaccagccttggcctcccaaagtactgggattacagctgtgagccatcacccctaatctcaaatggtcctgtagagtcagcctagactgtggtctatcttggaggatgtttgtgtgtgagacaatgtatattcttcaacattgtagattccattttggatgcttccatcgggactgtgtgcccctgtcctggaactcagctgaacacttggctcaaaatccattgctgttctctggaaattctgccctaatctcttggttaaatataaggtatgtgtagtaggctttgctttttctctttggggacaaaactcaggagggttgccccttggtgaacaaggctaacctgctgagcctttgaagcaaggaactggagatggtccttttaggggtttatgttctggattccagaaaatatgcaaacagggccaataaatgcatctttattttgtgtgtattttaacctggtcaaggaaaattccaacaagaaacccagagtgctggagcaagaagatcccatgctgtgaccctctagaggaagcactttctgtttgttgtctgagaaaaaacaaagtgcttccctttagagttactgtttgggaaaagcagtgttgaagttgatgctgatgttggtaatatatttgcatgcttatcatcagacttggatgatgttggggttctgggttttttttgttttctaagacagggtctctgtggcccaggctggagtacagaggcacttccaacctaggtctcttgggctcaaatggtcctttttgggacagagtcttgctctgtgactcaggctggagtgcagtggtgcaatctcagctcactgcaccctccacctcctgggttcaagtgattctcctgcctcagcttcctgggattacaggcacctgacatcatgcccagctaatatttgtatttttcttttttattcattcatttatttattttttaggtggagtcttgctgttgccaagtctggagggccatggcacgatcccggctgactccaacctctgtctctcaggttcaagcaattctcctgcctcagcctcctgagtagctggaattacaggcgcttaccaccacgcctgactgcttttcgaatgtgtgcgtatgtgtgtgtatgtgtgttagagagaaagagagagagagagatggagtttcactcttgttgcccaggctggagggcaatgacatgatctcggcccatacaacctcagcctcctgggttcaagtgattctcctgcctcagcctcctgagtagctaggattacaggcatgtgccaccacacctggctaattttgtatttttagtagatatggggcttccccatgttggtcaggctggtctcgaactcctgacctcaaatgattcacctgcctcagtctcccaaagtgctgggattacaggtgtgagccaacatgcccggcctgaattttttttttttttttttttttttcaagtaaagacggggtttcaccatgttgaccaggctggtctcaaacctctgaactcacgtgagctgctcgcctcggcctcccaaaggcatgagccatggtgcgtggccatcaacacctcttactttatcgaaatttttctggcactggtatagaacctcacgtggggtcaggtggagttgaagggacctcagtgtccctgcagatgggatgagcaagagcacggaggtggagtgcatggggcttcagtgtttattggggaaatgaagctgaaatcttgggtgcgtgaccaggaaataaatgcatgagacgggggtctcactatgccaccctggctaaagtgggcttagatcctcctgcctctgccccccgcagtccttgctagatgggactacatgtgaatattaacccatgcacagacaagaagaatgtaagaaccattatttggttcacaccgggccctcagttaaacttgtattttagacaaacaatgtatctgagatgtccttgaacaacaaatgatttgctgttcaggtgtgggcatctttgttttttccctaattttaatgatgggactagtctgggtacggtggctcccgcctgtaattccagcactttgggaggctgagataggaggatcacctgaggtcagttgtttgagaccagcctcgccaacatgatgaaacctcgtctgaactaaaaatatagatattagccagacggggtggtggtgcacccctgcaatcccagctactcaggaggctgaggcaggagaatcacttgaagccaggaggctgagctttcagtgagctgagattgagccactgcactccagcctgggcaacagagtgagactcagtctcaaaaaagtaaaaaataggctgggtgtgggccgggcgcggtggctcacgcctgtaatcccagcactttgggaggccgaggtgggtggatcacaaggtcaggagactgagaccatcctggctaacacggtgaaaccctgtctctagtaaaaatacaaaaaaaaaaaaaaaattagccagacgtgatggtgtgcgcctgtactcctagctactcagaaggctgaggcaggagaatggcctgagcccgggaggcggagcttgcagttagctgagatcgcaccactgcactccagcctgggtgacagagcaagactccgtctcaaaaaaaaaaaaaaaaaaaaaaaggcggggtgtggtagtgcacatctgtaatcccagcatttcgggaggccaagacaggaattacctgaggtcaggagttcaagaccaacagggccaacatggcaaaacctcgtctctactaaaaatacaaaaattatctgggtgcagtggtacacatctgtaattccggctacccagaggctgaggcaggagaatagcttgaacccaggaggaggagatttcagtgagctgaaatcacaccattgcacttcagcctgggccacagagcaagattgtgtctcaaaaataaataaataataaaaatgacataaaatcaataaataaaaataaatacataaatacaggaacatcattaatttggatgtcacctttgtgcaggggccagggtaatctctgtcattccaattttttttatgtgcactgccaaagcaagcactcatgtaggaattatccttcctgtgagcatataatatatggaacattctttgagacagggtctcaaaaatatgatgtgtatttcatcatatatataatataatcgtatacacacaaaatactgtttaaatacagagaataccctgatatcaccttgggtatttttctttgtttctgtgtgtgtgtgtgtgtgtgtgtgtgtgtgtgtgtgtgtgtttgtttggttatttctgagacaaggtctggctctatcgcccaggctggagtgtagtggtgtgatctcaactcactgcaacctccgccccccacctaaacctgctgaattagtgtctacaggcatgcaccagcacacctggctaacttttgtattttttgtacatatggggttacaccatgttgccggggctggcctctaactcctgagctcaggtgatcctcccgcctcagcccctaaagtgctgggattagaggtgtgagccaccgcaccccagccatacttgtgtatttctattcaaattttattgaggagtttttaccgcccagcctgtggtctatcctggagaatgtttgtgtgtgcgacaatgtatattcttcaccatcgtagattccgttttggatgctcccatcgggactgtgtgtccctgtgctggaactcgagtgaacacttggctcaaaatccactgctgttctctagagatctgtagggtccagccctactgggcctgtgggtttttctcttcgtgagcagataggagagattgtagaaataaagacacaagacaaagagagagaagaaaaggcagctgggcctgggggaccactaccaccaagacgtggagaccggtagtggccccgaatgcgtggccgcgccgttatttattgtatacgaggcaaaagggcagggtaagaagtgtgagtcttctctaatgataggtaagatgacgcgagtcacgtgtccaccggacagggggccccttccctatttggtagcttaggcggagagagattggggacagcttacgtcattatttcttctatgtatttctcggagagatcaaagactttaatactttcacttattctgctaccgttatctagaaggcggagccaggtgtgcagagcggaacgtgaaagtggaccaggagcgtgaccgctgaagcacagcatcacagggagacgtttaggccaccagacggctgcgggcgggcttgactgatgtcaggctttccacaagaggtggtggagcagagtcttctctaactcccctggagaaagggagactccctctccgggtttgggaaggtaagggggtccttcccaggcactggcgctaccgctgtgctaagtgacgggtgccttccccctggtgttaccgctggaccagggagccctctagtggccgtgtccgggcatgacagagggctcacgctcttgtcttctggtcgcttctcaccgtgtcccttcagctcctatctctgtatggcctggttttccctaggttatgattgtagaacaaagattattataatattggaataaagagtaatgctacaaactaatgattaataatattcatatataatcatatctataatctatttctagtataactagtcttattctatatattttctttgttatactggaacggcttgtggtgagtttctttattataccggaacagcttgtgccttcggtctcttgcctcggcacctgggtggcttgccacccacagaaatcctgcccgtttctcttggttaaatataatgtatttctagtaggcattgcttcttctttccagagacaaaactcaggaggattgtgctatgataaacaaggctaacctgctgattctctgaagcaaggaactggagatggtccttctaagggtttatattctggattccaggaaacatgcaaacaggacccataaatgcatctttattttggtgcccattttgacctggtcaggagaattccaacaaaaaatccacggtgttggagcaagatctcaggctctcaggctgtggccatctagaggtaagaagcactttctgttgtcttaaagaaaagaaagtccttttttttttttttttttttttttgagacaatgtctcgctctgtcgcccaggctggaatgcagtggcgtgatcttggctcactgcaagctccgcctcccgggttcatgccattctcctgcctcagcctcctgtgtagctgggactacaggcgcccgccaccaagcccggctaattttttgtatttttagtagagacggggtttcatcttgttaggcaggatggtctcgatctcctgacctcatgatccacccgcctcggcctcccaaagtgctgggattacaggcgtgagccaccacgcccgcccagaaagtgctttctttcagagggttacggtttgagaaaagcagcattgaagttgacgctgatcttggtaatacatttgcagagcatgcttatggtcagacgtggatgatggtggggttttgtttttgttttgttttttatctgagacagggtgtctctgttgcccaggctggagtgcagtggcacatccaacctagatctcttgggctcaagtggtcctctttttgaaacagagtctcactctgttaccctggctggagttcagtggcaggaacttggctcactgcaatctctgtctcctgggttcaagcaattctctggcctcagcctcccgagcagggttacaggcatgtgccaccacgcccggctaatttttgcatttttttaattgatttatttgtttgttgttgagacagtctcactctgttgcccaggctgtagtgcagtggtgtgatctcagctcaccgcaacctccacctcccatgtcagcctcctgaatacctgtctccaggcatgcacccccacacctggctaacttttgcattttttgtacagatgaggtttcaccatgttgcccaggctggtcttgaacccctgagctcaagtggtcctcccacctcggcctcctaaactgctgtgattaatggtgtgagccaccgtgccacacccgtacttgtttgtttctgctcaaattgtattgaggagcttttacatcctagtctgtggtctatcctggaggatgtttgtgtatataacaatgtacattttcaacattttagattccattttggatgctcccatcgggactgtgtgtccctgtgctggaactcgagtgaacacttggctcaaaatccattgctgttctctagaaatcctgccctattctcttggtgaaatataaggtatgtctagtcggcattgatttttctttctggagacaaaactcaggagggttgcccctgcatgaacaaggctaacctgctgagcctttgaagcaaggaactggagatggtttttttaggggtttatattctggattccagaaaacatgcaaacagggacaatgaatgcatctttatttttctgtccattttaacctggtaaacgaaaatttcaccaaaaaacccagagtcctggagcaagaagatctcaggctgtgaccctccaaagggaagaactttctgttgtctaaaagaaaagaacgcacttccctttagagtgttaccgtgtgagaaaagcaacgttgaagctgatgctgatcttggtaataagtttgcagagcctgcttatcatcagacttggacgacggtgtagttctgttttggttttgagttttttgtttgtttgttttgttttgcttttgagatggaggcttgctctgtcgcccaggctggagtgcagtggcgtgttctcagctcactgcaacctccgcctcccaggttcacgccattcttctgcctcttgagtagctgggactacaggcgcccgccaccacgcctggctaattttttgtatttttagtagacacagagtttcactgtgttagccaggatggtcttgatctcctgaccttgtgatccacccgccttggcctccaaaagtgctgggattacaggcgtgaaccactgcgcccggccttaatttttgtatttttagtagagacaggaggctgagctttcagtgagctgagttcgttccactgcactccagcctgggcaacagagtgagactccatctcaaaaaaataaaaaataggccgagcgtggtggcacatgcctgtaatcccagccctttgggaggccgagacaggtggatcacctgaggtcaggagttaaaggctggctgggccaacaaggcaaaacctcgactctactaaaaatacaaaattacacctgtaatcttagctgcttggggggctgtggcagaagaacctcttgaacccaggaagaggagattgcagtgagacgaaatcataccattgcactctagcctgggcgacagagcgagattctgtctcaaaaaataaataagtagggcagacagggtggctcacgtctgtaatcccagcactttgggaggcaaggcgggtaaatcacaaggtcaggagttcgagaccagcctggccaacatggcgaaaccccatctctactaaaaatacaaaaaagtagctgggcatggtggctggcacctgtagtcccagctacttgggaggctgaggcaggagaatcgtgtgaacccaggaagcggaggttgcagtgagccgagatcgggccattgcactccagcctgggcgacagtgcgagactctgtatcaaaaataagtaaataaataaacaaaataaaagtaaaaagaattaaatagataaatatggtaccattatgaatttgagtgtcacctttgtgcaggggtcatggtaatctttgttatttcaatttttttatgcgtattgccaaagcaagcacatatgcgtaggaattatacttcctgtgagaatacaatatatggagctttcttttttgttttttctgtttgtttgttttttgagacacagtttcactcttgttgcccaggctggagtgcaatgtcacgatctcagctcacggcaacctctgcctcctgggttcaagcgattctcctgcctcagcctcccaagtagctgggattgcttgcatgtgccaccaagcctagctaattttttgtatttagagtagagatggggtttctccatgttggtcaggctggtctcgaactcctgacctcagatgatccatccacctcagcctcccaaagtgctgggattacagatgtgagccaccatgcccggccatgatatatttttatatatgtaatatcacatacacacaaaatactcttctatgcacagagaatagtcttatatcactttgggtatttgtgtgtgtgtgtgtgtgtgtgtgtgtgtgtgtgtgtgtgtgtgtgttttgtttggttggttatttttgagacaaggtctggctctgtcatccaggctggagtgtagtggtgtgatctcagctcactgcaacctccacccccgacctaagcctactgaattagtgtctacaggcacgcactaccacacctggctcacttttgtattttttgtacacatggggtttcacaatgttgccggggctggtctcaaactcctgtgctcaggtgatcctcccatcacggcctcctaaagtgctggaattagaggtgtgagccgccacgccccacctgtacttgtgtatctctgttcaaatgttactgaggagcttttacagcgtaacctgtggtctatcctggaaaatgtttgtgtgtgagacaatgtacattcttcaacatcttagattgcagtttggatgctcccgtcaggactgtgtgtccctgtgctgggactcaagtgaacactgggctctccatccattgctgttgtctagaaatccagcccaattctcttgggtaaatatgaggtatgtgtagtaggcattgctttttctttctggagacaaagctcaggaggattgccccttgataaacaaagctaacctgctgattctttgaagcaaggaactggagatggtccttttaggggtttatattctggattccagaaaacatgcaaacaggaccaataaatgcgtgcttatttttgtgtctgttttaacctggtcaaggaaaattccaacaaaaaatccacgatgctggagcaagaagatctcaggctgtgtccctctagagggaagcgctttctgttgtctgaaagaaaagaaaatggttccctttagagtgttacgctttgagaaaagcatcgctgatcttggtaacacatttgcagagaatgcttataatcagacgtggatgatgttgaagttttgcgtttgttttgttttgttttttttcctagacagggtgtctgctgcccaaactggagtgcggtggcacttccaacctagacctcttgggtttaagtggccctctattttgggatagagtcttgctctgtggccctggctggagtgcagtgtcaggaactctgctcactgcgacctctgcctcctaggttcaagcgattctcttgcctcagcctcctgagcagctgggattacgggcatgtgccaccatgcctggctaatttttgtattttttattatttatttatttatttatttttgagacagagtctcgctctgtcacccaggctgaagtgcagtggtgcgatcttggctcaccgcaacctctacctcccacctcagcctcctgaacagctgtctccaggcgtgcaccaccacacctggctaacttctgtatttgttttacagtcatggtttcaccatgttgcccgggctcatcttgaactcctgagctcaagtgatcctcccgcctcagcctcctaaagtgctgtgagccaccgtgtcccaacagtacttgtgtgtttccgttcaaattgtattgaggagcttttacagcatagcctgtggtctctccgggagaatgtttttgtttacgacaatgtatattcttcaacatcgtagattccattttggatgccctcattgggactgtgtgtccctgtactggaactcaagtgaacacttggctcaaaatccattgctgttctctagaaatccagcctaattctcttggttaaaggtaaggtatgagtagtaagcattgctttttctctttgggaacaaaactcaggaggattgccccttgatgaacaaagctaacctgttgattctttgagggaaggaactggagatggtccttttaggggtttatgttctggattctagaaaacacacaaaccggacaaataaatgcatctttatttttgtgtctattttaacctcgtcaaggaagattccaacaaaaaatccacagtgccggagcaagaagacctcaggctgtgacactctagagggaagcgctttctgttgtctgaaagaaaggaaagtgcatccttttagagtgttactgtttgagaaaagcaacattgaagctgatgctgatcttggtaataaatttgcagcgaatgcttataatcagacttggatgatgttgggcttctgagtttttttttgttttgttttgtttagttttggggtttttctgttttttgttttttgttttttttttttttgaggccgagtcttgctctttcgcccaggctggagtgcagtggcgctatctcggctcactgcaagttctgcctcccgggttcacgccattctcctgcctcagcctcctgtgtagctgggactacaggtgcccgccagcacacccggctaattctttgtatttttagtagagacggggtttcaccgtgttagccaggatggtctcgatctcctgacctcgtgatccacccgcctcagcctcccaaagtgctgggattacaggcgtgagccaccgcgtccagccttgttattgtttttgagactgagtcttgctctgtggcccaggctggagcgcagtggcgtgatctcggctcactgcaacctccatctcccaggctcaagcaattctcctgcctcagcctcctgagtagctgggattacaggcctgtgccaccatgcccggctaattatttgtatttttagtagagacagggtttgcaccatgttggccaggctggtctcgaactcctgacctcaggtaatccacccacgtcgatctcccaaagtgctgggattacaactgtgagccactgcgcccggcctgtttttctctaccacagggtgtctgttgcccaggctggagtgcggtggcatttttaacatagatctcttgggctcgagtggtccttttttttggttcagtcttgctttgtgacccaggctggagggcagtggcagaaactctcctcactgcaacctccgcctcctaggttcaagccattctcctgactcagcctcctgagcagctgggattaccggtgtgagccaccacacccagctaatttttgtatttttatttatttgtttatttatttatttattgttgagacggagtcttgctgtgtctcccaggctggagtgcagtggcgcgatcgtggcttactgcaacctcctcctccttggttcaaccaattctcctgcctcagcctcctgagaagctaggattacaggcatgcaccaccatgcctggctaatttagattccattttggatgctcccatcaggactgtgtccctgtactggaactcaggtgaacacttggttcaaaatccgtcgcttttctctagacatccagctcagttctcggtaaagataaggtatgtgtagtaggcattgctttttccctttagagacaaaactcaggaggattgccccttggtgaacaaggctaacttgcagattctttgaagcaaggaactggagatggtccttttaggggtttatgttctggattccagaaaacatgcaaacagggccaatacatgcatctttatttttgtgtccgttttgacctggtcaaggaaaatttcaacaagaaacccagagtgccggagcaagaagatctcaagctgtgactgcaaagggaagccctttctgttgtctaaaagaaaagaaagtgcttccctttggtgaattacggtttgagaaaagcaacgttgaagttgatgctgatctcggtaatacatttgcagagcatgcttatcacacttggacggtggtggggttctgttttggttttgcttttttattctaagacagggtctgtgttgcccatgctggagtgcggtggcacatcccacctaggtctcttggattcaaatggtcctttttgggggcagagtctctctatcaccgaggctggagtgcagtgatcccatcttggctcactacaacctccgcctcccaggttcaagcaattctcctgcttcggcctcccaagtagctgagatttacaggtgcccatccccacacctggataatatttggttttattcatgtatttatttatttttaagatggagtctcactgtcacccagactggagggcagtggcacgatctcggctcgctgccacctgcgcttccctggttcaagtaatgcttctgccttagcctcctgagtagctggaattacagaagtacaccaccacacctggctactttttatatttcatttttaatacagactggatttcaccatgttggctagtatgatatatattttgtcatatattcttatatatataatcatatacacacaaaatactcttctgcacacgaagagtattcttatatcgctttgggtttttttgtttgtgtgtttgttttgtgtttgtttctttgtttttgagacaacgtctggctctgttgctcaggctaaagtgtagtattgcaagctcagctcactgcaacctccacctcccacctaaagtcccctgaattagtgtctacaggcatgcaccaccacacctggctcacttttttttctgagaaggaattttgcttttgtcgctcaggctggagtgcaatggggtgatttcagctcactgcaacctctgactcccggcttcaagcaattctcctgcctcagcctcccaagtagctgggattacaggcatgcaccaccacacctggctaattttgtatttttagtagagatgggtttcaccttctttctcaggctggtcttgaactcctgacctcaagtgatccacctgcctcgacctcccaaagtgctaggattacaggtgagagacattgcacctggccacctaacttttgtagtttttttacagacagggcttcaccatattgcccaagctggtctccagctactgagctcaagtgatgctcctgtctcggccactgtccctcacccaaacttgtgtatttcttttcttttctttttttttttttttttttgagatggagtctggctctgtcacccaggctggagtgcagtggcacgatcttggctcactgcaagctccgcctccccagttcatgatatttttctgcctcagcctcccaagtagctggcactacaggcacccgccaccacgcctggctaattttttgtatttttagtgaagacggggtttcactggattagccaggatggtcttgatctcctgagctcgtgatctgcctgccttggcctcccaaagtgctgggattacaggcttgagccaccgcacccagcttttttgtttttttgttttgtttttttgagatggggtctcgctctgtcacccagcctggagtgcaatggcacgatctcggttcactgcatcctacccctcccgggttcaagcgattctcctgcctcatcctcccaagtaactgggattacaggtgcccaccaccgcgcctggctaattttttgtatttttagtagagacggggtttcaccgtattagccaggatggtcttgatctcctgacctcgtgatctccctgcctcagcctcccaaagtgctgggattacaggtgtgagccactgcacccggcctttttttttttttttttttttttgagatgggatctcgctctgtcacccaggctggagtgcaacggcatgatctcagctcacggcaacctccccctcccgggttcaggtgattctactgcctcagcctcccaagtagctgggattacaggtgcccacgaccacgcctggctaattttttgtatttttagtagagatggggtttcatcaaggtggccaggctggtctcaaactcctgacctcatgatctactggcctcggcctaccgaagtgctgggattacaggcatgagccaccgcgcccagcttctgtatttcttttcaaattttattgaggattttttatgtcctagcctgtggtctatcctggaggatgtttgtgtgtgagacaatgtatattcatcaacatcttagattccattttgattgcttccgtagaaactgtgtgtccttgtgctggaactccggtgaacacctggctcaatatccattgctcttctctagaaatccagcccagttctcttggttaaatataagatatgtgtagcaggcattgctttttctttccagagacaaaactcaggaggattgccccttgatgaacaaagctaacctgctgattctttgaagcaagtaactggagatcctccttttaggggtttatattctggattccagaaaacatgcaaacagggccaataaatgcatctttatgtttctgtccattttaacttgatctaggaaaattccaacaaaaaacccacggtgctggagcaagatctcaggctgtgaccttctcgaggaaagaagcactttctgttgtctgaaagaaaagaaagtgcttcctttcagagggttacggtttgagaaaagcaacgttgaagttgacgctgatcttggtaatacatttgcagagcgtgctgatcatcagacgtggataatggtggggttttgttttttatctaagacagggtgtctgttccccaggctggagtgcggtggcacttccaacttagatctcttgggttcaagtggccctctttttgggacagagtctcactctgtggccctggctggagtgcagtggcaggaacttggctcactgcaatctctgcctcctgggttcaagcaattctcctgcctcagcctccggagcagctggggttacaggctgtgccaccatgcccagctaacttttgcatttttattattgatttattgatttatttttgagacagggtctggctctgtcacccaggctatagggcagtggtgcgatctcggctcactgcaacctccacctcccacctcagcctcctgaatacctgtctccaggcatgcactaccacacctgcctaacttttgtattttttgtatagatgaggtttcaccatgttgcccaggctggtctcggacccttgagctcaattgctcctcccgcctgggcctccaaaactgctgtgattaatggtgtgagcaagcgtgccctactcttgtgtgtttctgctcaaattttatggaggagcttttacatcccagcctgtggtctatcctggagaatgtttgtgtgtgtgacaatgtatattcttcaacattttagattccatttggatgctcccatccggactgtgtgcccctgtactggaactcaagtgaacacttggctcaacatccattgctgttctcatgaattccaggccaattgtcttggttaaagacaaggtatgtgggctgggcgtggtggctcatgcctgtaatcccagcactttgggagaccgaggtgggaggatcacgaggtcaggagttcgagacaagcctgaccaacacggtgaaacccatctctactaaaaatacaaaaattagctgggcgtggtggctccaccagtaatctcagctacttgggaggctgaggcaggagaattgcttgaacccaggaagcggaggttgcagtgagctgagatcgcgccactgcactccagcctgggtgacagagcgagacttcatctcaaaaaataaaaaataaaaaggtatgtgtagtaggcattgctttttctctttgtagataatactcaggaggactgcctcttgaacaaggctaacctgctgagcctttgaagcaaggaactggagatggtccttttagggggttatgttctggattccagaaaacatgcaaatagggacaatgaatgcatctttatttttctgtccattttaacctggtcaaggaaaatttcaacaagaaacccagagtgctggagcaagaagatctcaagctgtgagtctacaaaggaaagcgctttctgttgtctgaaagaaaagaaatcgcttccctttggagtgttacggtttgagaaaagcagcgttgaagttgatgctgatctcggtaatacatttgcagagcatgcttatcacacttggacggtggcggggttctgttttggttttgctttgttattctaaaacagggtctgtgttgcccatgctggagtgcggtggcacatcccacctaggtctcttggatttaaatggtcctttttgggggccagagtctctctctgtcaccgaggctgaagtgcagtcatcccatcttggctcactacaacctccgcctcccaggttcaagcaattctcctgcttcagcttcccaagtagctgagatttacaggcgcccatccccacacctggataatatttgggttttttttttatttatttttaagatggggtctcaccgtcacccaggctgtagttcagtggcttgatctcggcttactgcaatgtatgccacccaggatcaagtgattctcctgccccagactcctgagtagctggaattacacgcacctgccactacacccggctactttttgaatttttttttttttttttaaagtaaagatgggctttcaccatgttggccaggctggtctcaaacccctgacctcaagtcagctgcttgcctcagcctcccaaagtgctgagaatacaaacatgagccactgcgtggccatcaacacctcttactttatggaaatttttctggcactggtatagaacctcacgtggggtcaggtggagttgaggggacctcagtttcccttgcagatgggatgtgcactgctcagcaagagcacagaggtggagtgcatggggcttcagtgtttattggggaaatgaagctaaaatcttcggtgtgtgaccaggagataaatgcatgagatggggatctcactatgctgcccaggctgaagtgggcttagatcctcctgcctctgcccctccccagtccttggtacatgggactacatgtgaatattaaccccccatgcacagacaagaagaaagtaaggactgttctttggttcatacctgaccccagttaaacatgtattttagataaacaatgtatttgaaatgtacttgaacaacaaatgatttgctgtttaggtgtgggcatctttttttttcttcctaactttaaatatgggactagtccaggtacggtggctcatgcctgtaattccagcactttgggaggcggagacaggaggatcacctgaggtcagttgttcgagaccagactggccaacatggtgaaacctcgtctgtactaaaaataaaaaaattagtgagacgtggtcttggtgcatgcctgtaatcccagctactcgggtggatgaggcaggagaattgcttgaggctgggaggctgagctttcagtgagctgagatcaagcctctgcactccagcctgggcaacagagtgagactgagtctcaaaaaagtaaaaaatcagctgggtgcgctggcaaacacttgtaatcccagcactttgggaggccgagacgggaggatcacctgaggtcatgttcaagactaacagggctgaaatagcaaaacctcatctctattaaaaatacaaaaattagctgggtgcagtggtgtatatctgtatttccagctacttggaggctaaggcaggagaatcgcttgaacccaggaggaagagatttcagtgagctgaagccatgccattgcactccagcctgggccacagagcaagattccatctcaaaaataaaataaataataaaaatgaaattaaatagataaaaataaatagataaatatgagaccatcatgaatttggatgtcacttttgtgcaggggccagggtaatctctgtcattccaattttttttatgtgcactgccaaagcaagcactcatgtgtaggaattattcttcctgtgagcatataatatatggaactttgagacagagtctcaaacatatataatgtatattttatcatatattctttatatataaaatatcatatagacacaaaatactgttctaaatacagagaatactctgatatcaacttgggtattttttgtttctgtgtgtgtgtattttgtttggttggttatttttgagacaaggtctagctctatcacacaggctggagtgtagtggtgcgttctcggctcactgcaacctccgcctcccacctaagcctgctgcattagtgtctacaggcatgcaccaccacacccggctcacttttgtattttttgtacacatggggttacaccatgttgccggggctggtctcgaactcctgagctcaggtgattctcctgtcttggcctcctaaagtgctgggattagaggtgtgagccaccatgccccatcggtacttgtgatttaggttcaaattttgatgagtttttatgaccaagcctgtggtctatcctagagaatgtttgtgtgtttgacaattcaacatcgtagagttgattttgggtgctcccattgggactgtgtgtccctgtactggaacttgagtgaacacttggctcataatccattgctcttctctagaaatccagcccaattctcttggttaaatataaggtatgtgtagcaggcattgctttttccttccagagacaaaactcaggaggattgccccttgatgaacaaggctaacctgctgattctttgaagcaaagaactggagatggtccttttagaggtttatattctggattccagaaaacatgcaaacagggccaataaatgcatctttatgttttcgtccattttaacttgatctaggaaaattccaaaaaaaaaaacccacggtgctggagcaagaagatctcaggttgtgaccttctcgaggaaagaagcactttctgttgtctgaaagaaaagaaagtgcttcctttcagagggttacggtttgagaaaagcaacgtcgaagttgacgctgatcttggtaatacatttgcagagcgtgctgatcatcagacatggataatggtggggttttgtttttgttttatttttttatctaagacaaggtatctgttgcccaggctggagtgcggtggcacttctaacctagatctcttgggttcaagtggccctcttttcgggatagagtcttctttgctctgtggccctggctggagtgcagtggcaggaactcggctcaccgcaacctctgcctcctgggttcaagcaattctcctgcctcagcctgtcgagcagctggggttacagacatgtgccaccacgcctggctaatttttgcatttttattgtcgatcgattgattgatttttgagacagagtctggctctgtcacccaggctgtcgggcagtggtgcgatcttggctcactgcaacctccacctcccacctcagcctcctgaatacctgtctacaggcatgcacaaccacaccttgctaacttttgtattttttgtacagatgaggtttcaccatgttgcccaggctggtctcggacccctgagctcaagtactcctcaaacctgggcctcctaaactgctgtgattaatggtgtgagccaccgtgccctactcttacttgtgtgtttctgctcaaattttattaaggagcttttatggcctcgcctgtggtctgtcctggaggatgtttgtgtgtgtgacaatgtatattcttcaacatcttcgattccattttgggtgcctccatggggactgtgtgtccctgtactggaacgcaagtgaagacttggctcagagtccatttgctgttctctagaaatccagcctaatcctcttgtgcaaatataatatatatctagtaggcattgctttttctttctggagacaaaacacaggaggattgccccttgatgaacaggactaacctgctgattctttgaagcaaggaactggaaatggtccttttagggatttatgctctggattccagaaaacacgcaaacagggccaataaatgcatctttatttttgtgtccattttgacctggtcaaggaagattccaacaaaaaatccacagtgccggagcaagaagatctcaggctgtgtccctctacagggaagcgctttctgttgtctgaaagaaaggaaagtgcatccttttagagtgttactgtttgagaaaagcaacgttgaagttgatgctgattttggtaatacatttgcagagcatgcttatcatcagacttggatgatgttgggttctgtttttgctttgtttttttttccaagacagtgtgtttgttgcccaggctggagtgcggtggtacttcccacctagatctcttgggctcaagaggtctttttttatttttctttctcaagagagagtctggtggtgacacccaggctggagtgcagtggtgcattatcagctcactgcagccttcccctccccggttcaagtgattctttcacctcagcctcccgagtagctgggattacaggtgtgggctaccacacccggctaatttttgtatttttagcagagacagggttttaccatgttggggaggctggtctcaactcctgtcctcaagcgatccacctcccttgcctcccaagtactgagattacaggcgtgagcaactgcgcccggcctcaagtggtcctcttaagtcagcctaccaagttttgggactacatggggcatgccaccacacttggctaagtttttaatttttttttttttttttttttttttttttgagacggagtctcactctgtcgcccaggctggagtgcagtggcaagatctcggctcactgcaagctcggcctccggggttcacgccattctcctgcctcagcctcccgagtagctgggactacaggtgcccgccaccacgcctggctagttttttgtatttttagtagagacggggtttcaccctgttagctaggatggtctcaatctcctgacctcgtgatccacccgcctcggcctcccaaagtgctgggattacaggcgtgagccaccgcgcccggccgatagtttttaatttttgatagaaagggaatctctcttgcctaagatggtctcaactcctgagctcaagggatcctaaaggtgtgagccgccttgtcctgatgacccatttcaaacgtagctgacatggccaggcatcatggggcacacagtcccagctactgcagaagccggggtgggagggtcctttgatttccaggctataccatgtgctgatcacacttttgatcccgagtagctgggattacaggcagccaccgccaggccggctaatttttatttatttacttattttttcagacggtgtttccctcttgttgcccaggctggagtgcaatggcatgatctcggatcactgcaacctccacctccctggttcaagcgattctcctgcctcagcctcccgagcagctgggattacaggcatgcatcaccacgcccggctaattctttgtatttttagtagagatgggatttctccatgttggtcaggctgatcttgaactcccaaccttaggtgatccacccacctcggcctcccaaagtgctgggattacaggcatgagccattgtgcccggcccatttcatttatttttatgtgtgctgctgaagcaagcacttatgtgtaggaattgttcttcctgtgagcatatgttggccagcctggaccacataccaagatcccatctctttaaaaacacagattacgtggcacctggcacctggtcccagagacttcatttgggttggtcatttgaaacactagcctcccatcaatttagtgtaatcaatccaaatcatgtgtccttcattaagagactaagaacgcctccacgtctatccagtctattttgtaatccccaacggttgtcaatattaataaaatttcttttctttttcctattcatttgtgtctttagtttttcttccccaaaaacttgccatcatttctcggaatagacctgctttctctgcaggaagggtgtggttgattcaacccttacccactaatgccaaccccagtgagttcttttatcctattttctatgggtaacgattccaaggtaccattccaccgggcaaaagctcacatctaagtgtcagttgctcggtaagatgtgaaatgtttgctgtggctaatataagaaacaaactattgtagacaagatgaatctcagtggcagtgataaatgtcgcacaagacaaaaccacagatcctttttttttttttttttttttttagacaaagtttcactcttgttgcccaggctggagtgcaatggtgcgatctcggctcactgcaacctccgcctcctggaggcgattcaagcgattctcctgcctcagcctcccaagtagctgggattacaggcatgcaccaccacgcccaggtaattttgtatttttagtagagacggggtttcgccatgctggtcaggctggaactcctgacctcagatgatcctcccacctcagcctcccaaagtgctgggattacaggcgtgagccactgtgcccggccaaccacagatactttcacgaaagcctttagggccctagaaggggctccctagtaacaggtgggatgcgaggcagctctcgttgttgccgtagtgagcgatgcctgttcgtccagccctcaacaccttttactccgtggaagttatgcctgcactggtttacagaacctcccttgacttgggttgaggtagagctgaagggaacctcagtgtcccttgcaggtgggatgtgcactgcttagcaagagcacggaggtggagtgcatgggctttgagtttttattgggaaaatgaagctgaaatgtagggcgcatgaccacatcataaatgcacatttgatttaatttttctattttatttttatttatttattttgagatggagcctcgctctgttgcccaggctggagtgcactggcctgatctcggctcactgcaacctccacctcccgggttcaagcaattattgtgcctcagcctcccaggtagctgggattacacgcatgcttccacgcccggccgatttttgtatttttagtagagacggggtttcaccatgttggccaggctggtttcaaaatcctgacctcaagtgatccgcccgcctcggcctctcaaagtcctgagattacaggcgtgagccaccatgaccagcctaatttttctattttagagacagtggtctagctatgccacccgggctaaactaggctttagagatcttcctgcctctgcccctccacggtctctggtagtttggactacaaatgaacattagcatatttgcaaccaccaccactctagtttggaagatttttatcaccccaaagaagcttatacccatttgccttcagtacccacccccctcttccactcagaccctggcaactactctacatctctctagctctggatttgcctcttgtgggcatttcacaaaaaccagtcttgaatgggtggcctgttgtgaccacttttaatataatgggttggttctggttgtctgaagtgtgaatcttgccaatgaaggatggtccctggatggaagcaggaggctgggagaactgggcggaacatcctttcggaatggagtggggtgggcacaccctgatgtctgggaagctcacaagggtggaagaacccatcttcctctctgataactgcaaggtgaccctcctggggcactggatggagtgaaggcatctggactgggaacaccagggcattgcactggtgcaggcaggatgagccgaggggaaaggagtgccaggcatcattctctggtgacagtttgggtttgatctggatggagcaggtgtcttctggtagagagagtccctgggatttttgctctgctcctggctgtctttcagtcatggaatctgatgacaaaggctcccactctgggccacttcatttggtttctggagcccagtggtcctttctgcccggactcaggatcttttggggaaatttgggacctcgcaggacatctgcacaatccatagaaatccctgagagccccttccctttgctgacatctccgtattcctacctattgccttccaaaaaaagacccttatctgaattgccaaagggggcttcccagagcagggaaacccggttaaatttgtatttcagattaacagcatatctagaatctactcgaacaagaagtgatttgttgtttaagtgtgagaaatttttttcccctaattttaaatacggaacccatcatgaatttggctgtcacctttgcgcaggggccgtgggaacctatcatttcattgtttaatgtgtgctgccaaagcaagcacttaagtgtgggaattattcttcacgtgaggatacaatagatggaacgttattacttttttctttcataattgagattttattggttgaagatcggtacagacatttcaatttgtacacaattcttaacatacgtaccgaaaatctaaaaagccatgtattgtaaatcgttttgttttgttttgtttttttgagacagagtttcgctcttgtcacccaggctggagcgcaatgacgcaatctcggctcaccgcaacctccgcctcccgggttcaagcaattctcctgcctcagcctcccaagtagctgggattacaggcaaatgccaccatgcccggctaatttttgtatttttttttttttaagtagagacagggcttctgcctgtcggtcaggctggtctcgaattcccgacctcaggtgatctgcccgcctcggcctcttaaagtgctgagattacaggcgtgagccaccgcacccggccatgtattgtaattcttctacaaagttattccggcgactttccagcttaaaatttggaagcacattttccttaagaggctatcaagtaccagtatcttcacatgttgatcagctgttacggacgtccctccaattcacaactaaaaatagcatgtaccctacatattcaaatttttcatctttcacaacgcagaaacaaacttattaggagaacagaactaccacaatcaaagatgttacagagtccacacaattctaacagggagagccatggtcagggagtggttttctttaggaaacaattccaaaatacgacaggagaatagaagtaatttaaaatgttcaagacactaaatgcagagctgattccatgctgccatttaatatgctttgtattataggatataaacacgaaccctggccgggtgcagtggctcacgcctgtaatcccagcactctgggaggccgaagtgggcagatcacctgaggtcaggagttcaagaccagcctggcccacatggtgaaaccccatccctactaaaaatatgaaaattagccaggcatggtggtgcgcgcctgtaatcccagctactccggatgctgaggcatgagaatcgcttgaacccgggaggtggagattgcagtgaactgaaatcacgccactgccctccagcctgggcgacaagaacaagactctgtttcaaaaaaaaaaaaaaaaaaaaagtttctggaactactaaaaaacttgcatttacaaaatagttgataaaaagattcctctgggttttacaagaagcgagacagggagcactgatgagacgtggtatacggtgaatcagactgggcatcagaggctgggcctcctcagttttcctttccccattttctgcagataaatctttagtttcttggttagccacttctgcccgttttccctttgctcccctttgcccttctgttcacacttttttgtctgaagatgtatccttcgttgctgcctttttcggcttcatttccactggtttttttgttttgttttgttttgttttgtttgagacgtagtttcaccctgttgctcaggctggagtgcaatggcgtgatctcggctcacagcaacttctgccttccggttcaagcgattctcttgcctcagcctcccgagtagctgggcttataggcgcgcaccgccatgcccggcttatttttgtatttttagtagagacgggggtttcaccatgttggccaggctggtctcgaactcctgacctcaggtgatccgcccgcctcagcctcccaaagtgttgtgattacaagcgtgagccaccgcacccggccttgcttccacttttgcaggagcaggtttagctgacaaccgtgcgatctcctcgtgggctcttccttggcggcccctatggcggagctaacctgcctcttgggcatcctggtggcggagagggcgcgtgccggctgtctgcgggccgcggctgccgagagccttggcgaagctgggctgcctggcggctgcggctcctcccgccgcccgagctgctgagacccacagcggggtcggtgggagaaccgaatggaacccgaaactttcttattttgagacaggatctggctctgtcacccaggctggagtgcttggctcactgcaacgtctgcctcaagtgatccttccacctcaacctcccaagtagctgagattacaggcgcgcgtgccactatgcctggctaatttttgtactctttgtagagatgggggtctcgctatgttgcccacgctggtcttgaactcctgggctcaaatgatcctcctggcctggcttcccaaagtgctggttgtaacgccagcagtttgggaggccacagtcggcgggatggattagctagcaacaaacattccaggcagagaatggtgctctctcaactctcagtcagcaaggggctagtatatattgaaggggctcagggcatgtcaccccaaagtcatcgcgtcagcatatggattatttcgacctggaagcctgtgggaaaaagcagatgcatctgacctcccccttcctacgtaaaagtagattgtaaaatttatcaagaggaaaacgcccttcctgcgccaggaagagaagaatgttcctatcagcaggggccaggagtccatatgctaaacaactcagctactaacccttatcttccttaagttccccactgtttcctggtcacttcccctagcccaagcctctttgtcttgtcacatccccacaacttatcattccttttttttttttgaggtggagtttagctcttgttgcccaggctagagtgcgatggcgcaatcttggctcactgcaacctctgcctcccgggttcaagtgattctcctgcctcagcctcccaagtagctgggattacaggcgcccaccaccacgctcggctgattttttgtatttttagtagagatggggttttgccatgctggccaggctggtcttgaactcctgatctccggtgatccgcccgcctcagcctcccaaagtgctgggattgattacaggcgtgagccaccgcgcccggccatcattctcttttttgttttgttgtggttgttgttgtttgagacagcgtctggctttgtcacccaagctggagtgcagtggcgccatctcagctcactgcgacctctgcctcccgggttcaagcaattctcatacctcagcctcccgagtagctggaaccacaggcatgagccaccatgcccggctagttacagggttttcctatgctctccaggctggagtgcagtggcgcaatcatagttcactgcagtcttcaactcctgggctcaagcaatcctcccacctcagcctcttaaactgctgggattacaggtggtagccatcatgccctgccccagagaagtctttaggcttcagccaggcacggtggctcaggccggtaaacccagcactttgggaggctgaggtgggaggatcgcttgtgcccaggagttgaaggctgcaatcagctatgactgcaccacagcactccagtctgggcaacaaagtgagaccctgtctcaaaaaacaacaccgtaggcccagcacggtggctcctgcctgtaatcccagcactttgggaggccaaggcaggtggatcacttgaggtccagagttcaggaccagcatgaccaacatggtgaaaccccgtctctactaaaaatatacaaattagccaggtgtggtggcagacacctgtaatcccagctacttgggagactgagggaggataattgcttgaacccgggaggcggaggttgcggtgagccaagatcgcgccattgcactccagcctggttgacagagcaagaccctgtctcaaaaagaaaggaaaagaaaaagaatacaccagaaggtacccagagaggccagtgtggatgtacagccagcacataagatgctggttagggacaggcgcagtggctcacgcctgtaatcccagcactctgggaggcccaggcagggggatcacctgaggtcaggagttcaagaccagcctggccaacatggcgaaaccccgtctgtactagcaaatacaaaaattacttgggcgcggtggcacgtgctataatcccagctactccggaggctgagggtggaaaattgcttgaacccgggaggctgaggttgcagtgagccgagatcgcaccactgtactccagcctgggcaacaagagcgaaactccgtctcaaaaaattaaataaataggccgggcgcggtggctcacgcctgtaatcccagcactctgggaggccgaggagggcggatcacggggtcaggagatcaagaccatcctggccaacatggtgaaaccccgcctctactaaaaatacaaaaacttcgccctgtatggcggcacacggctgtattcccagctactcgggaggctgaggcaggagaacggcttgaacccgggaggcagaggctacagtgagccgggatcacaccgctgcactccggcctgggcagcaagagcaaaactctgtctcaaaaaacaaaaaacagaaaaacaaaaagaatcaagtaagtcgaagccacactgataacagccaatttttgtgaaccaagggagtgtcaattcaagaatttacatagatgtctacttttgctatctcctatgtgccaagcaagatacaggctctgggcaatcagaaacaaaagagactcactcgttcctctcacagtactcagtccttactgagataaggacaaaagaaaatgtcctgtctggaatgcagggaaaccagaacttcaggtcaggggacatttccattgaattgtgtggagttgaagctgaaaatacttttttttttttttttttttttacatcacggcatggtttattacgtgatttttttactatacaaacaaaaaatacagaaatgcaatatgtgaatacagctaaatgcagaatggtgacttttttctcttcaagaggccatgattcccatttctagtaaaataaagagaccgcatacaggttggttgtgagattcacaattttgcctagaaatgatctataaatgcatttttcccccctgctacctaccgtaaatcgtaaaaagggagttaaagcaaagtttccttgttggttcctaccatatggaagatgctatattctattttagcagggtcaatatttggaaaatatctaaattaaatattattacaaaaatgaagctgtaatgagattctggctaaagagggcactaaatgagaataatatatatttaaagaatccaaaacaaacaaacaaaaagaggttattataaaaagctctaggtgcactgtaagcatatagggtttttttttcatgtgtttttttttaaacaatggaagtgtcaaaaatagggtcaactgtgttagactaaattacattattgtatatgctgcattgaatggaacctttgtattataattatcatagagaagcacagtttgcatcatattatggcaattcatcgtcaatgaaaaccttccagagtccttttattttggaatctcctgtaaactatcaaaccaccagaacatgactgtacaacagtaaaatgttctcttgcattaaactgaagagacctgtttaataaaaaaagaaaaagaaaatgtaggaaaggtacttagagctgttactttctaagtacacaacaccctagacaattcgaggcatcttaatctccatcaagaacaacaacaacaaaaataatttttgtcatgttgttaaatccatcattatggatcaaactggtgcaacttggtcaaatgaatccaacaaacactgatgtccaagctggcatattggcaactaatacacaactggtggtcaatagagagtttaaaagatcttccctttcttgttgttcttttccaaggttctcaaagagttctgttgctctaaaatacgttgttgagcttcccagtttgctttctcatcctcaaactgacgacgtttctcctctaattctttgtgccgtgctcccaaattctttttcagttgcacatggcactgctggagctaaatcacagcacaatatataccccaaggatactgccttcctctgaccctttttccattaacttcagtgataatatcactacccaccacagcaagaggtaaacggtcctttatctttttaacacgtttcttttcttcttcatcatctgtttctggaaattcatatattttaattttatgttcttggatttctttcattatctgttttgtaaactgttgacattcctctggtgtgagtgtgtctgctttggcagtaagtgggatgatattcactttttcatgcaaatgtttcataaactcaacatccagtggtttaagtctcaacaaaaggcaatgtcaagtagttacaaacatgcactacccaatcctgcctgaaggtgggagtcttcagttatgtaatggtcctgttatcaggcatctgacgtctgctcactcgcgattctgcatttaggtagtcctcaaatttactatcaatgtaatcgataacaggctgccagcaattactactatccactgcatctccaaatcctgaggtatcaactatcctgagcagcaactaaacaccaccttctttgattaaaactttggattgttccatccaggcttctattttcccatagaggtccaaaaaacgcccttgtttgttaagttgatatatgtaaaccttttctccaggctgttccttgaggtttacataattgggaactccttcaagcatctgtaaataaaccttttcagctgtagatctctctattttcagttaatttgcagaccaccaactataggagccaagttgaaagagaaaaaagtttctcttcccagcactttctttaggatgcttttcattgcttcccaactggaggcctcgcccctccacccacctgccctagtcctcagctgcctccagttctgtccacttaaatacagactcccggtagtagagaacttttttaaaattttattattattattattattattattgacacagtcttactctgtcgtccaggctggagagcagtggcacaatctcagctcactgcagcctctgcctcctgggttccagcgattctcctgcctcagcctcctgagtagctgggattacagacacccgccaccatgcccggctaatttttgtatttttggtagagacgggggtttcaccatgttggccaggctggtcttgaactcctaacctcaggtgatcctcctacctcggcctcccaaagtgctgggattacaggcgacagccaatgtgtgcacggcccaggtattaaggaattcaatctctatttctcaccaatgaattaggctctggaagttagtagattttaacaaatacttgttaagctaagttcttctcaaaggtctttaggaatattcagtaaaagaggactctgttaactgaaaaccagttctgttccagtaaatcctcaacagatggagaaaatgagactatgccccaccctttccccttagggcctccacattgattagaggaggaattctccttttaatgactgactgagctatcactcctctctgtcagtaaaaacagcagcaaaaaaaatgtcttggctgggcgcagtggcacatgcctgtaatcccagctctttgggaggccgaggtgggcagatcacctgaggtcaggagtttgagaccagcctggccaaaaccccgtctctactaaagatacaaaaattagccgggcatggtggcaagtgcctattgttgtacctgagcgagttagaaaaacgccacactttgagacgaattaagagtcctttattagctagcgcctgagagacgtctaaggcttaaaattctctcagcccggaggaaggggcttgattaacttttataccttggtttaggaaggggggggcgtccagttaaaacaattttacagaagttaagtaatcaaaaagttaaaaggataaatggttacaggaaagtaaaacagttccaggtgcaggggctttaagactattacaaggtgatagacgcggggctttgggcgttatcagtcagacgaattcttggggactgcggatatagcttgccacagtatcttatcagttaattgcattcttggatgtgctggaagtcagcttgcacaagttaagtccttgaggaagggactgccagtgaaagagccaagatggaatctgtctggctttcttagcttagggagagtcagttcaggtggaaacaaggctaggtgattaaaggaaaagggagagtctaaaaacagggttagtaaaaaccaggttgggtattacactataatcccggctgcttgggaggctgaggcgggagaatcgcttgaacctggaagatggtggttgcagtgagccgaggtcgtgccactgcactccagcctgggtgacagagcgagactctgtctcaaaaaaaaaacaaatttcttggccaggtgctgtggctcatgcctataatcctagcactttgggaggcccaggccggcagatcgcttgaggtcaggagttcgaaaccactgtggccaacatggtgaaaccctgtctctactaaaaatacgaaaaagttagctaggcgtggtggcagacgcctgtaatcccaggtcctcgggaggctgaggcaggagaatcgcttggacccggcaggtggaggatgcagtgagcagagatcgcactacttactgccctccagcctgggcgacagagtgagactctaacaacaacaaaaaaaaaaagaaaaagaaaaagtaaaagaaaattctgacatcaagctcattgaaatgtattcttccctttcctcagctgctgccaaggtgctcggtccttccgaggaagccaaggccgcgttgcagtgaggccctcacttcatcccgcgactagcaccacgtccggcagtgccagccccacactcgcccgcgccatggcctctgtctccgagctcgcctgcatctactaggcgctcattctgcacgacgatgaggtgaccgtcacggaggataagatcaatgctctcattaaagcagctggtgtaaatattgaacctttttgacctggcttgtttgcaaaggcctggtcaatgtcaacatcgggagcctcatctgcagtgtagaggctggtggagctgctccagctgaggagaagaaagtggaagcaaagaaagaagaatccgaggacggtgatgatgacatgcgctttggtctttttcactgaacctctttttataaagtgttcaataaaaagctgaacttcaatttaaaaaaaaaagaaataaatgtattctttgcatctggcatagtgtgcccagcgcgtgtgatcccagctatgcaggaggatcatttgagtccaggagttccagtccagcctgggttaacaggtagaaccccttctctggaaagaaaaaaatgtaaaaaggcattctttgtgtattatttttttgaaacagggtctccctctataccccagactggagtgccttggtatcatcacagcttactacagccttgacctcctgggcccaagcagtcctcccacctcagtccccggagtagctgggaccacaagtatgcaccaccatgcccggctaattttttatttattattctctttctcttttctttttttttttttttttttgagatggagttttgctcttgttgcccaggctggagtgtaatggcgtgatctttgctcactgcaacctccgcttgctgggttcaggtgattctcctgcctcagcctcccgagtagctgggattacaggcacctgccaccgtgcccagctaatttttgtatttttagtagagacggggttccaccatgttggccaggctggtcttgaactcctgaccacaggtgatccacccgcctcagcctcccaaagtgctaggattataggagtgagacaccatccccagcctaaataattcttttttttttttgagacagagtcttgctctgtcgcccaggctggagtgcagtggccctatcttggctcactgcaacctctgcctcctgggttcaagcgattctcctgcctcagcctcccaggtagctgggattacaggcgtctgccaccgtgcccggctaatttttatatttttagtagagacagggtttcaccatcttggccaggctggtctcgaactcctgacctagtgattcacctgcctcggcctcccaaggtgctgggattgcagtgtgagccaccacgcctggccatatatttttatatatatgtatatatgtgtgtgtgtctgtgtgtgtgtatatatatatatatatatatatatatatatattttttttttttttttttttttttttttttctaaagatgaggtctccccatattgcccatgctggtctcaaactcctggcctcaagccatcctcccaccacggcctccaaaagtgctgggattacagatgtgatccgctgcatagggccaaaaaaccccaccttcttttgggggttaataggcacctgaagccaataataataaaataataaaaataaaaaagaaaccaataataataggtcgggcacggttgctcatgcctgtaatcccagcactctgggaggctgaggcagggggatcacctgagatcgggagttcgagaccagcctgaccaacatggagaaacctcatctctactaaaaatacaaaaaagttagctgggtgtgatggcgcatgcctgtaatcccagctactcgggaggctgaggcaggagaatcgcttgaacctgggaggtggaggttgcggtgagccgagatcgcgccactgcactccagcctgggcgacaggagtgaaactccatctcaataaataaataaataaataaataaataaataaatgggcacctgaaatctctttttccgaagttgcgaattatccaattcatgccttagaatttagtcacatttccaggcctgtcccctgacttccgtttccatttcctcagtgatgtcccccaacctctctgcagatccaagcctcttcattgaggccattttacacatcagcaccatccaacagaactttttttttttttttttttgagacggagtcttgctctgttgccaggctggagtgctgtggcgcaatctcggctcactgcaacctctgactccctggttcaagcgattctcctgcctcagtctcctaagtagctgggattacaggcacatgccaccatgcccagctaatttttgtatttttagtagagacggggtttcgctatgttggccaggatggtctcaaactcctgaccttatgatccgcctgccttggcctcccaaagtgctgggattacaggtgtgagacatcgtgcccggcccatccaacagaactttatatgcaaggatgcacctgttctgtacctgcactattcaatatagtcctgatgtgggccaggtgcggtggctcatgcctgtaatcccagcactttgggaggctgagctgggcaggtcacttgagcccaggagtttgagaccagcctgggcaatatggtgaaaccccgtctctacaaaaaatactaaaattatctggacatgatggtgggtgtgtgtagtcccagctattcaggaggctggaggtgggagaatctcttgagcccaggaggtcaaagctactgtgagccgtgatagtgccactgcattccagccagggtgacagagtgagaccctgttttacaatatatatatatttatattttatatattattatatgtaatataaaaatatatatttatttatcctaacctccgaaagtgctgggattaccgtcatgagcccccaagtccagcctaattttatttttattttacatttatttatttatttacttatttatttattttttgagacagagtgtcgctcaggctagagtgtagtggcacaatctcggctcactggaacctccatctcccaggttcaagcaattctcctgcctcagcctcctgagtagctgagattacaggcacacaccaccgcgcccggctaatttttgtatttctactagagatggggttctaccatgttgtccaggctggtctccaactcctgacctcaagtgatcctccccctcagcctcccaaagtgccaggattacaggcatgaaccactgcacctgtcatatttatttattttcttagaaagagtctcactctgtcacccaggctaaactgcagtggcttgatctcagctcactgcaacctccgcctccctgggtcaagcgattctcatcctcagcctccccagtagctgggattacaggctcctgccaccatgtctggctaatttttgtatctttagtagggcggtttcaccatgttggtcaggctggtctcgaactcctgacctcaagtgatctgcctgccttggcctccgaaagtcctgggattacagctgtgagccactgggcctcaccttttttttatttttctttttcagacagagtctcactcggtcgcccaggctggagtgcagtggcctgatcttggcttactgtaacctctgcctcctgggttcaagcgattctcctgcctcagcctcccaagtagctgggattacaggctcctgccactacgtccaggtaatttttttttgtatttttagtagaaacggggtttcaccatattggccaggctggtctcaaactcctgtcctcaaatgatctgcccgctttggcctccaaatgtgctgggattacaggtgtgagccactgtgcccagccctgtccacattttctagcaagcactctatcagccataactcttgagcatggaacccaaatataaattgtatggctctgagtgtctggcaaggcaggctctagaagaaggcagctggaagatggtgttcttgaccactgcagggttcggccactttagagataattgatagttccagtgaggacttattcaatagaaatataaaaagcaggccaagtgcagtggctcaagtctataatcccagcactttgggaggctgaggcgggaggatcgcttgagctcaggagttcaaaacttgcctgggctatgtagcgagaccctttctctacaaaaaataagaaaattaggcatggtggagtgcacctgaggtcccagttgctcagggggctgaggtgggagaatcacttgagcccaggagattgaggctgcagagagctgtgacagagtcactgtactctagcccgggcaacagagcaagactcaaaatgaagaaacagattttggctgtgcgtggaggctcatgcctgtaatcccagcactttgggaggccaaagtgggtggatcatgggtggtcaggagttcaagaccagtctggctaacatggcaaaatcccatctctactaaaaatacaaaaggtagctggacatggtgctgggtgccttaatcccagctacttgggaggctgagccaggagaatctcttgaacctgggaggcggagtttgcagtgaacccagatagcaccactggactccagcctgagcgacagagagtgagactccacctcaaaaaaaaaaaaaaaaaaaagctggccccgagcacggtggctcactcctgtaatcccagcactttgggaggccgaggtgggcagattgcctgaggtcaagggttcgagaccagcctgaccaacatggagaaacccccctactaaaaatacaaaaattagctgggtgtggtggcgtgtgcctgtaatcccaactactcgggaggctgaggcaggagaatcgcttgaacccgggaggcggaggttgcagagagccgagatcccgccattgcactccagccggcaacagagagaaactccgtctcaacaaaaaaaaaaaaaaaaaagaaaagaaacaaatttggagcatataccttgacagactcccccccttgaccaaactttacacaggctgtcctgagccctcctgactaggcctgggccttggctgctatcttatctttgaccttaccagcccactcttagcagagattcctgctgagttatctcttgactcttcccatctaactgcccctgatatctgatgaagtgcctcatccaccacctttgatgtaggaggccttggcccacctttagcaagaatcccgttaggccagttgaagcagaaatcctctgtccagggtgcctcctttgtaattttccatccatgaacccatctctctgttctttggctaaatcccatttttgcttcttcttttttttttttttgagacggagtctcgctctgtagcccaggctggagtgcagtggcgcgatctcggctcactgtaacctccgcctctccaggtttaagcaattctctgcctcagcctccagagcagctgggattacaggcgcgtgccaccatgccccgggaatttttttgtatttttagtagagacggggtttctccatcttggccaggctggtctcgaactcccaaccctgtgatccacccacctcggcctcacaaagtgctgggattacaggcgtgagccaccgcgtccggtcttttttttttgagacaagctggagtgcaatggcatgttctcaactcactgcaactttcgcctcccaggttcaagcgattctcctgcctcagcctctcgaatagctgggattacaggtgctcgccaccacacatggctaaattttgtatttttggtagagacggggtttcgccatgttggccatgctggtcttgaactcctgacctcaagcgatctgcccacctcagcctcctaaagtgctgggattacaggcgtgagccaccgcagcctttgtccactccttgcctcgatactgaggtcagcaaacattttctctaaagagctagatagtaaatggtttaggttttgtgggtcacgtggtctctgtcacaatttctcaactctgcaattactatagcaagaaagtggccatagggtcaggctctggctctcctgcaattcccacgctttgggaggcccatgcatgaggatcacttgagcccaggagtttgagaccagcctgggtagcatggcaaaaacccatatctactacaattgcaaaaaattagccaagtgtggtggcacaagcctgtagtcccagctactagggaggctgagacggggttgcttgagcccagaagttcaaggttacagtgagccatgatccagccactgcactccagcctgggctacagaggaaaactctggctctttatgaaataaaaatgaataaatagggtggggggctaggggagggaaaacattaggagaaatgcctaatgtaggtgacgggttgatgggtgcagcaaaccaccggggcacatgtatacctatgtaacaaaactgcacgttctgcacatgtaacccagaacttaaagtacaataaaaataaatagataatttaaaaatgaataaataaataagcagagcccagaggctcttttctttctttctttcttttttttttttttttgagacggagtttctctcctgttgcccaggctggagtgcaatggcgcgttctcagttcagtctcttccctttaatcccacatactcaggaggctgagatgggagggatacttgagaccaggagtttgagaacagcctgggcaacatggccaagaccctatctccagtttaaaaaaaaatgccaccacgcctggctagtatgtatatatagtatttattttgtagagacagggtttcagcatattgcccaggttggcctcaaactcctgagctcaggcaatctgccacccttcacctcccaaaatgctgggattatgggcttgggccaccacgcctggtctaatctttcttatacaatgtcccccccacacccccgaatcgaggatggacgccagcaccttttaggtgttccacatattaaaccatgtgtattaaatcttggagtgttaagaacacaggcaaacaaaataagcagccattaaccggggaaaggtttaatctagtctggcaagaatctttccttcctgaactcatcccattgcagaaaagatggataaaatggtaaattctccttaatgtcataaggaggtttatcatgcacccacccaaagtctgtagataaacagtgactgagagaaaaatgggattacaggaacgaatattgtacataaaaggatttctcaaactgttaggctgtttacaaaaaaaaaaatgctaatctcattgttatggggagctggggcagattatgcaaagggctgggtttcagggtgaggattcagggtgattatcatgacaaggaggtctattggtttgcaaacgatgacctttcagctcagcaggaagaacttctgattaggcaaaatttcctctatctgtccgctcctcccaagaagcacgggctatgaaatctcatgtcctaaatatttgggatttctgattccttctgttattttatgtatttatttattttttgagacggagtctcactcttgttggccaggctggagtgcagtggcatcatctgggctcactgcaacctccgtctcctcggttcaagcgattctcctgcctcagcctcccaagtagctgggattacaggcatgcgccaccacacctggctaattttgtattttagtagagatggggtttcgccatgttggccaggatggtttggaatccctgacctcaggtgatccacccacctcagcctcccaaagtgctgggattacaggctcgagccaccgcgcctggctgtcattttttttttttcaaagagctcatttaagagtaaagataaattgacacttaaagttcactaatagttaatacaattattacaatttgaggctttacgttaaatatgtgtgttgaattaccgcaataatacaagaccagatcaactatacttgtcaggtcagaatgaaaatctaagaagcgcatcttgaattttaaatttttttcaatttgatttttcttgtcaagcctggttgtggggggggaaggtcaagtcttaaactggtctcaccaccaatgttatcaattgtcaaaaaaaaagtcaaattgggccaggcgtggtggcttatgcctgtaatcccagcactttgggaggccaaggtgagaggttcgcttgagcccaggagtttgagaccagcctaggcaacaaagcaagaccagcatctccctctctctctctctcttctctctctctctctctctctcatatatatatatatatatatgtattttttttctttctttctttttctttttttgagacggagtcttgccctgtcacacaggctaaagtgaatggtgtgatctcggctcactgcaacctctgcctcccaggttcaagcatttctccctgcctcagcctcccgagtagctgggattacaggcgcccaccaccacaccgggctaatttttgtattttttagtagagacggggttttcttatgttgaccaggctggtcttgaactcctgacctcaactgatccgcctgcatcagcctcccaaagtgctgggattacaggaatgagccactatgcccagcccatctctatatttttaaacaaattatacaacaaaaaagtaaaatatcacattggatattttttctttattctttgtttttttttttttttgagacagagttttgctcttgttgcccaggctagagtgcaatggcgcgatctcggctcaccacaacctccgcctcccgggttcaagcgattctcctgcctcaacctcctgagtagcatgcaccaccaccccggctaattttgtatttttagtagagacggagtttctccatgttggccaggctggtcttgaactcccgacctcaggtgatccgcccacctcggcctcccaaagtgctgagattacaggtgtgagccaccgtgcccagcggatcttttttcttttcttttttctttctttccagggatggggtcttgctctgtcacctgggctggagttcagtggcaggatcaggcctcactgcagccttgaactcatgggctgaagagatcctcccacctcagctttccaaattgctgagattacaggcttgagccactgcctgcagtcctctttcaaatgcacttaaaaatcgtctttgactatactctttgttgaatgttgattaaattcaattgcactaataacattttttatattcaaaaatacaaacgttggccgggtgcggtggctcacgcctgtattcccagcactttgggaggccgaggcgggcagatcacctgagtttgagagtttgagaacagcctgaccaacatggagaaaccccgtctctactaaaaatacaaaattagccggcgtggtggcacatgcctgtaatttcagctattcgggaggctgaggcaggagaatcacttgaacctgggaggcgaaggttgtggtgagccgagatcgagccactgcactccagcccgggtggctgagggagactccgtctcaaaaaaaaaaaaaaaaagtcagcaatgaactcgctgtgctggcccaagggcaggagaagaaagccgcccttaaaggagaaatttgcaaagacaaaatgaggtgatgagaaaaagccgagttctaggaaatacccgagagatcatccaggtggttcacaaatagcagaaaatccaggtgcagtgtgagaggagtgagtaggttagataggaatctggatggctgagctgtaaggacataagcactgacctcccgcaaccttgacaaagatcaaagcaagaatttttttttttttgagatggagtctggctctatcacccaggctggagtgcagtggcgtgatgtgagctcactgcaacctctgcctcctgggttctagcgattctcgccaaacatgctatttgctgtctcatttctatctctcgccatcctttgcagcaaatgctgtacattttcattgatgaaggaactaggtttaaccagaaaggttgagcacgtactcccgcagctggctaggattacaaatgggaaggaaaccctggcctcctggggccccaagtcttccccttccttgagtcattcattattttgagcacttaccattttcaagcccctcctcacctctccaacacccacctttttgagttcctctctatgcctcaaggtcaaaggaactctagtggtttcattaaataaaatcagaaatgtttccgcttttttatcaaagttgctctcaaaaatgttcactgccgcactgtttttttcttttctccctctctttttttttttgagactaagtctcactctgtcgcccagaatggagtgcagtggtgtgatctcggctcaccgcaacctccacctccagggttcaaaggattctcccacctcagccccctgagtagcagggattataggtgtgagccacaccgcacccagcttttttatttttttaaaatttattattattatttttgagatggagtctcactctgtcacccaggctggagtgcagtggggcgatcttggctcactgcaacctctgcctcctgggttcaagcaattcccctgcctcagcctcccgaggagctgggactacaggtatccaccaccacgccgagctaatttttgtatttttagtagagaccatgttggctaggatggtctcgatcgcttgacctcgtgatctgcctgcctcggcctcctgaagttctggcattataggcatgagccactgtgcccagcctatttatttattttttgagacacggtctcactctgtccccaggctggaatgcagtggcacaatcttggctcactgcaacctctgcctcccgggttcaagcaattctcttgcctcagcctcccaagcagctgagattacaggtgcacaccaccatgcgtgggtaatttttgtatttttttggtagagacggggtttcgccatgttgcccaggctagtctcgaactcccggcctcaagtgatcgtccgcctcggcctcccaaagtgctgggattacaggtgtgagccactgcgctctgccaaaatactatatttaaatatttgttgagtggatgactggtggaatgattttcttctggttatttctctgtgttttccaatgtatttataacgaatacatgttggcgttactagtaatagggatcacctaatttctatttgaatcagtgtttgaaaaagtttatgaaggtgtgtctgactaaggcaagctaggatcaaagggagcagggtggcttggggcggagaccagggggaatgagagggtgggaaggggtgggctttaatcctatcaaagttgagtgggctctcaccctatataagaacgcagctgcagtgaaccttgttctttctggcagacctgaggtgtggacgtatcattggcctctgtgagtattgctatgttattttattttctttcattttactttattttttagggtcaggatctcactgtcgcccaggatgaagtgcacaggtaggatgatggcgccttgcagcctcgacctcctgggactcacccttttagcctccagtagctgggaccacaggcgcgcaccaccattcccatgtgcgtttttctgcttttttttttttttttttaggagagatggggttttctatgttatccaagctggtctcgaactcctgggctcaagagcaatcctaccaccgtagccttccgagtagctgggactacaggcttgagccactccgcccagccgggctgtacttttgttctatttctgtgattttttttcagtcttaaggacgaaggccccactgtccctcacacgtgttccttcctacttgcattgtactcagtcctcatggcttgcatctggaggctatgggcgggggagtgctttgaatatctatacgtggaaagccttgttttttactttttaagaaagggtcgttaaattcgtgctttgtagaccttcaacagctcatcaagggctactctccacctccttgcttaaaagcctcttctgatgggtaagtgcttccacttgcgatcgccgccttgccgcatcccctcagcctgtggcactcaaactgtgggggcactttctgctctctggtgaaagtgccgccatcttttgagtgttaccgcttgagaagactcaacctgcggagaagataccattttgattgggtgagggggcgggtagcaggatggccctagaccctgcctatggccgtttcctcgtgatataaatttcttggccggggctcttgcagatggagctgctcaccctgtgggcctcaaatgtggagcactattctgatgtccaagtggaaagtgctgcgacatttgagcgtcaccggtgacgcccatatcaacggatgccgtggagctcggtcttctgcaggaactaaagagcctgtggtttcgattcccagccggaaactgtcttgggtacaggtcccttacagcgtctggctgtaatggctccggaaaacctggggaagggaagggggcctcctgggctctcacctgacacaactaagggaatctgggttagatggtgaaaggaagagaaggttcagagggcggctgtgcgcctgcgccgggcgcggcggctcacacctgtaatcccagcacgttgggaggccgaggcaggcggatcacgaggtcaggagatcgagaccatcctggctaacacggtgaaaccccgtctctactaaaaatacaaaaaatgagccgggcgtggtggcgggcgcctgtagtcccagctacttgggaggctgaggcaggagaatggcgtgaacccgggaggcggagtttgcagtgagccgagatcgcgccaccgcactccagcctgggcgacagagcaagactcattctcaaagaaaaaaaaaaaaaaaaacagcagctgtgaccaaggggctgtatgcacaaagaaaggaatgctttttgctgttggtgttataattgatatgtaactttcctcttcccccatagcaagcaagtttattgctgacatttaacatgtgcttggatgattggaggccaacctcttgtaggcaagaaagtcacagtgatggcagatcctcgcgaggagctcatactgggatactcaaaatgggggcgctttcctttttgtctgtactgggaagtgcttcgattttggggtgtccctgtttgagtagggcatcacgaaccatcctgcttcaagggagcctgcgggtctgactgcagcttcagctatgacctggagttcccgggcttctctgcggggcaccagtctgtatgctccattttagataataaaaattggcatattctggggtgggcaggatacggggttcacctgcagatgaacagggcaggaaaagcttgatggggtgtcgggggaatctggttggccttaaagggaatttggggtcctgttcctgaatttggtaggcagcatgcatgtaaggcttgaagtgggtttggccagagcatgggctggagtgcttccaccctgctacacggacaatgccacagtctcacttttcctaacttttttttttaataaaatgtgaacaacatcatgtgtttctggtctattgggttcctctgccacccacaagtgctgggattacaggcatgagcctcatgtctggcgttactgaaccttcttctatgacccaagtacattgcctaaaaatacttgtcagtattttgtgcttcccttctacccctgctagaacttagagttatgctctttgagagttctgctctttaaacttcaaacaagtttaaaaagtaaggccgggcacagtggcagcactgccgaggccgacgcaggctgatcatgaggtcagatcaagaccatcctggctcacacggtgaaaccacatctctactaaaaaatacaaaaacattagccgggcatggcggtgggtgcctgtagtcacaggctgaggcagaaagggcatgaacccgggaggtggagcttgcagccagccgaggttgtgccactgcactccagcctgggtgacagcgataactgtctcaaaaaataaaaaccacccaggctgaagtgtggtggcaccatcacagctccctgcaggcctgagctccctagatcaaaagatcttcccatataagccccccctcaccccacccttagtagctggcaccacaggagtgtccccgccatgctccactaatgtttagtagaaattggggtctcatacattggccagcttggtctgaaacttagggggaatcaaacatccctcctttagtagagatggggctttactgtcttgccctgggtggcctccctgggatgatgggtgtgagccacagtgccaggcctaagttcatatttggaaggtttttttgcttcagatggtctcgtgctctcgctcaggttggagcgcaatggcgcaatcttggttcactgcaacctctgccagcttaagcgattctcctgcccccgcctcccaagtagctgggattacaggcataagccaccacgcctggctaattttttgcattttttagagatgggatttctccacgttggccaggctgctctggaactcctgaccccaggtgatccacccacctcggcctcccaaagtgctgggattataggcgtgagccaccacgtggggccttcagtaggttcttagttgctgtttgccctatcactggtttccgggtctgctggccactatcccctgtaagttttcctatcccctgtaggtgttccaaacccttgcggctgctttgcccactccacagtatctgaactgaagtaagatctcaaattcaagggagttttgttttgctatttgtacccgcaattcataaagcagttgtagcctctgtcccaataccgccaccactggtggggagtccgccacggtaaccagtaagacttctctttatatttgacctacctgggcctcctgtcatcttttctacgggcagcttggggattgttagttgagggttttttgtttttgtgtttttttttttgtttttttttttttttaaagagatggagtctcgctctgtcgccagactggagtacaatggcatgatcttggctcactgcaacttccacctcccaggttcaagcgattcttttgcctcagcctcccgagtagctggtattataggcacccaccaccatgcccagctaattttttttggatttttagtacagatggcgtttccccatgttggccgggctggtctcactaaactcctgacctcaagtgatccacccaccttggcctcccaaaattctgagattacaggtttgagccactgcgcccagcctttagttgagtttcttaagcttgtttagggtttagcctgtatggccagcagggtgtaggtgggggtggtttgtaagcagggctgtttgcttcagaagcagctgtggaaacaggactgaatgcagacatataaagaatattgggtaaataactttttaaaaaatttagagataggatcccactatgttgcccaatctggtcttgaaacctaaacaatctcttatcccaaagtgctgggattgcagaaagcttaaggcacagttttacgtggtaatggtgggccatttttagtttcttttttgtagacgatcatgtcatctaggctggaatgtagcggttctgtcgagctaggtgtagcctccacttcctggactcaagcatttttcctcagcttcagtagctgggtctatgcatgaataccccttctggggtagatagatagtagtacatagagtagataatttttttgtgttcaggcggcaccttaaggttggtgtaaaaattcttggccttctaaagagctggaattagacatgagctgttgcacctggccaatgggacaattatgtctacaggactgaatcagtatctgatctctggagttgtaaggtcactttttctgaaactgcctcagtctccttgcaggttctggtctgtagatctccagtgtgtgggctgagcacagcatggggacctgatttcccaccgggcagtgacatagtttaaagattcttagttcgaattcctaataatgggaatataggtttctgtgtattgaaatgggaatatgcattttttttttttttagagtcttgctctgtcactaggctggagtgcagtggcacaatctcggctcactgcaacctccgcctcctgggttcaagtggttcccctgcctcagcctcctgagtagctgggactacaggcgccctccaccacgccctgctaattttttgtattttagtagagacggggtttcaccatgttggccaggatggtcttgatctcctcaccttgtgatccacccgccttggcctcccaaagtgctgggattacaagcgtgagcctctgcacccagccaagggaatatggattcctcttttttttttttttttttttttttttgagacggcgtctctatcacccaggctggagtgcaatggcgtgatctctgctcactgcaacctctgtctcccgggttcaagtgattctcctgcctcagcctcccgagtagctgggattacccgcatgtgctatcacgcctggttaattctatatttttattagagacagggtttctccatgttggtcaggctggtcttgaactcccgacctcaggtgatctgccctccttggcctcccaaagtgctgggattacaggtgtgagccaccacaccctttttttttttttttttttaagatggagtctcgctctgtcgcccaggctggagtgcagtagtgcgatctcggttcactgcaacctctgcctcccaggtgcaagcgattctcccgcctcagcctccccagcagctgggactataggtgcatgccaccacacccagctaattttttgtatttttagtagagatggggtttcactgtgttagccaggatggtattgatctcttgacctagtgatccgcccgcttcggcctccaaagtgctgggattacaggcatgagccaccgtgcccagcctaatttttgtatttttagtaggtttcaccatgttggccaggctggtctcgaactcctaacctcagctgatctgcctgccttggcctccgaaagtatttggattacaggcatgagtcaccgcatctggcggtatttttgttgaaagcacagtgtataataggttatggccagcctacacgtggccttgtaggtgtcagttcttggcagggcccagtgaattccaggcagggggccatcctgacatgcctgccacgttaagatttcagacattatcccctccagcaagggaggatcagggctgttggcataacaagcattctgagggttagcttgcataccagtctcttcccaaatgctgagttgccccatgtatcctgtgacatttgagaataggctttcctcaacttggcacaatttgcctttggaccaagtgctttgtcctgtgcattccttgctggatgttggcatgcattcctagtgtcgtccactagatggcagtggcacccaccccagagctcaaatattactatgttccgatgcagccagggcttggcagggctgggtggcctctgagggcccctactggccatttttcaccgtctccctctgttgcccaggctggggcgcagtgatgcaatgacagctcactgcagcctcgacctcctgggctcaagcgatcttcccacctcagtccccagagtagctgggactacaggcatgtgctgctactcctgggtaattaattgtactaattaatagtagttggctaattagtaacagtggagtcttgctatgttgcttaggctggtctctaactcctagacttaagcaacccatcttgcctccacctttgaaagtacgggggttacaggcgtgagacaccgcacctggcccctgttgggatttacccctcctgttaggggccatcaaacctctcttagttggtcatcccttaaagctccgtcaaactttttttttttttttttttgagatggagtcccactctgtcgcccaggctggagtgcagtggcgcgatctcggctcactgcaacctccacctcccgggttcaagcgattctcctgcctcagcctcctgagtagctgggactacaggtgcccgccaccatgcctggctaatttttttttatttttagtagagacagggtttcaccatcttggccaggctaatctcaaactcctgacctcgtgatccacctgcctcggcctctcgaagtgctaggattacatacatgagccaccacgcctggccagctctgtcaaacattaatttgatcccaagcagagggacttttgatctcaatctgcatgagtctgtctctaggaaggaggctgatcattatgctgggggggtgatgagcaccctcccatcttcctctgtccagatctcaggggagagccagcagataggaccattcagcagccaatgtccaaataaggttttgttactcgaagcgctgccaacctactgtgggtcattttattcaggtccatcccaaataacctgtggacacaagagttgatattattccagtgtactactgtggcattcaattaataagccttaagtatctattgtgcactaccgtggtaagataattccatgatcctccagaaattccacccaacgctgctggaaagtaggcttactacatgctacatgcaagtccccaagctgtgttaactgcataatttttttttttttgagacacagtctcattctgtcacccaggctggagtgcagtggtgcaatctcagctcactgcaacctccacctcccaggttcaagcgattctcctgcctcagcctccccagtagctgggactacaggcgcccaccaccacgcccggctaattttttgtatttttagtagagacaaggtttcacccgtgttagccaggatggtcctagtctcctaacctcgtgatccgcccacctcggcctcccaaagtgctgggattacaggtgtgagccaccacacctggccaattcataatttatcatagccttatgaagatgcaactatgttctccattttttttttctttccccaagatggagtcttgctctgttgcccaggctagagtgcagtggcatgatctcagctcactgcaacctccgcctcctggcttcaagcgattctcctgccttagcctcccaagtagctgggattacagtcacgtgccaccatgcctggctaatttttgcatagagccacccgctcccagccgtaagtttttgtatttttagtagagatgtggttttgctatgttggccaggctggtcttgaactcctggcctcaagtgatttgcctgccttggccttttttttcttgagacaagttcctgctgggtcacccagtggcgtaatcatggttcactgcagccttgaactcctgagctcaaaggatcctcccacctcagccccctgagtagctttgattagaggtgtgtgccaccatacctggtgtgtgcgtgtgtgtgtgtgtgtgtgtgtgtgtgtgtaaagaaagcaattttcctaactcagcctgtcaaagtactgggattacaggcgccatcccctgcacccagcctaaactttgattgcatcactgcactccagcctgggccacagcaagatcctgtccaaaaaaaaagcaattggagtttgaacccaggcagagtaattctagattctcactcgaatcacagtgacctccaatgcaattggtgagccacgatggtccccttcaacagacaaggaaattttttttttttgagatggagtctcactctgtcacccaggctggagtgcagtggtgtgatcttgggtcactgcaagctccacctcccgggttcacgccattctcctgcctcagcctcctgagtagctgggactacaggcgcccgccaccacgcccggctaattttttgtgtttttattagagacggggtttcgccattttagccaggatggtctcgatctcctgacctcgtgatccacccgcctcggcctcccaaagtgctgggattataggtgtgagccaccgcgcccggcctcagacaaggaaattatccaaggtcacacagccagtagatgacatagctaatatgtggcctcatctgtatgccccctaattgcatacaccagtgcataacgtatttgtccatccagcttatctaccctcatgctcccagcccaatgtccagcctcctccagaaagaactggtcatcatccctcaccagaggactcggagtttgcagccaggatggctcagccgcttgcaaagcagtcggacacctgtgtcccctagggcgttgttggtcaggtaaaggtcggtcaaggtctggttgatccccagggtgaagtaaagattctcacaagccttggctgtgaggccacagctatccagcctggtgaagataaggagttggttaaggtaacaccaggggctacttatgttattcggaggcagtgtctcaccctgtctcccaggctggagtacagtggtgagatttctgttcactgcaacctccgcctcccaggttcaagcgattctcctgcctcagcctcctgagtagctgggattacaggtgtgcaccaccaccaattagcatggctaatttttgtatccttttatttttgttttgtttgagatggagtctccctctgttgcccatgctggagtgctgtggcatgatctcggctcactgcaacctctgcctcccgggttcaagtgattctcctgcctcagcctccccagcagctgggactacaggcgagagccaccacacccaactaattgttgtattagtagagagagggtttcaccttgttggccagaatggtctcaatctcttgacctcgtgatccgcccgcctcagcctcccaaagtgctgggattacaggcatgagccactgtgcccggccgtaatttttatatctttagtggagaggggatttcaccatgttggccagactggtctcaaactcctgacctcaagtgatccaccaaccttggcctcccaaagtgctgggattataggcgtgagccactacgcccagcctctgaaacattttaaaaaattatctgggttaggccgggcgtggtggctcacgcctgtaattccagcactttgggaggccgaggcaggcagatcacctgaggtcgggagttcaagaccagcctgaccaacatgagaaaccccgtctctactaaaaatacaaaattagccggggtggtggcgcatgcctgtaatcccagctactcgggaggctgaggcaggaattgcttgaacccgggaggtggaggttgcagtgagccaagatcgtgccactgcactccagggtgacagggagaccctgttttaaaaaaaaaaaaaatcccaaataaactagatgatgcctcatcccattctaagtccttcagattagggctacagctggcctggcagaaaggtgagggagaaagtcacaattaacatttgattggaatttacagagcaccagattgaattattatttttttttctcgagatggagtctttctctggcacctaggctggagtgcaatggtgtgatctccgctcactgcaacctccacctcctgggttcaagtgattctcctgcctcagcctcctgtgtagctgggattacagacacccaccaccacgccaggctaatttttgtattcttaatagagatggccatgttggccaggctggtctcaaactcctgacctcatgatctgtccgccttggactcccaaagtgctgggattacaggcatgagccactgtgcccggcctgaattattatttttgagacagagtcttgctctatcacccaggctggagggcagtggcatgatctcagctcactgtaatctcgcctcccaggttcaagtcattctcctgcctcaacctcccgagtagctgggattacaggcatgcgccaccacactgggttaatttttgtatttttgtagaatggtgtttcaccgttttggccaggctggtctcgaactcctgacctcaggtgatccacccgcctcggcctcccaaagtgctgggattgcaggcattaagctaccgtgcccagcctcttttgtaatttttaaattttaattttttttttttttgagacagagtttcactcttgttgcccaggctggagtgcaatggcatgatctcggctcactgaaacctctacttcccaggtacaagcgattctcctgtctcagcctcccaagtagctcggattacaggcatgtgccaccaggcccggctattttttttgtatttagtagagacagggtttcaccgtgttaggctggtcttgaactcctgacctcaggtgatccacccacctcggcttcccaaagtgctgggattacaggcatgcgccatcgcgcctggccttaagtttttaaaattttaagtcgggtagcacccccaaatcagaataagttcagagagacttcctgtcttttctttccacctctcttcttgctacctgaatcttttgtagtgaagcaggatagttcataaatagaaaaatgaaggatgagaaggcgcttccactgtccaaacgtgaccactgccaccccgtcactccccgatgctcaccacagtttctggagtctgcaggcgggatgttgcagcccctcagccagcaaccacaggccccagtctcccaggtcgttgaaactcaagtccagctcccggaggttgtggttggcctggagcaccacagaaagaccctcacaggcggcagagcccagccggcagatgcccaacctgcaaagacaggatgctagggcggagtgggaggcattcctcctgcaaaatctgctgggagggccctgtgccaagccctgtgctggttgcagacagagggacagactcaatctctacccttgagagacaaaaagaaaaagacgacagaagtaggaagatgagaggaagggaggaataagagaacagaaggaagcaactaagaatcaggccaggtgccctggctcatgcctgtcatcccagcatcttgggaggcttgaggctggagggttttttgaggtcaggagtttgtgaccagtctggacaaccaataacttgtctgtacaaaaaaaaattttttttctttttgcgatggcgtttccctcttgttgtccaggctggagtgcaatggtgcaatctcggctcactgcaacctccacctcacaagctcaagcgattctcctgcctcagtctcccaagtagatgggattacaggcatgtggcaacatgcccggctaatttttgtatttttagtacaagcggggtttcaccatgttggtcaggctggtttcgaactcctgaccttaggtgatccacccgcctcagcctcctatctacaaattttttttttttttttttttgagacagagtcttgcaatgtcgcccaggctggagtgcagtggcgtgatcttggctcactgcaacctccgcctcctgggttcaagtgattcttctgcctcagcctcctgagtagctgtgactacaggtgcacaccaccacgcccagctaatttttgtatttttagtagagacggggtttcaccagttggccaggatggtctccatctcttgacctcgtgatccacccgcctcagcctcccaaagtgctgggtttacaggcatgagccaccgcgcccagccgcgtgtgtgattttttgttttttgttttttgctggtgccttgataaaaaaaatacacaaagtgtgttttttgagcacttctacccacgtcttatactagtcactaggagatacagttggcatagctcctatgcttgtggaatgccaccacacacacatatacacaaattacaaatttttcttttttttttttgagatggaatctcgctctgtcatccaggctggagtgcagtggcaaaatctcagctcactgcaacctccggctcccgggttcaagcaattcttctgcctcagcctcctgagtacctggatatcaggcgtccgccaccatgcctggctaatttttatatttttagtagagacggggtttcaccatgttggccaggctagtcttgaactcctgacctcaggtcattctcccaccttggcctcccaaagtgctaagattacaggtgtgagccaccgcatcctgccttcagatttcaataaatgatgctgagggggaagtatgaggtcacataggatcataaatctaggaacccagattttagctagggattagaaagggtgtccagctgggtgtagtgggtcacacctgtaatcccagcactttggaaggccaaggccagaggatctcctaaggccaggagtttgacaccagcctaggcaacaaatcgagaccttgtccctacaaaaaataaataaaaattggccaggcgcagtggctcacgcctgtaatcccagcactttgggaggccgaggcaggtggatcatgaggtcaggagagagagaccatcctggctaacacggtgaaaccccatctctactaaaaaaatgtttttaaaaattagccgggcatggtggcgggcacctttagtcccagctactcgggaggctgaggcaggagaatggtgtgaacccgggaggtggagctcgcagtaagctgagatcgcgccaccgcactccagcctgggcgacagggcaagactcgtctcaaaaaaaaagtaaaaattagccatctgtggtggcatgcgcttgcagtcccagctactcaggaggctgagttgggaggatggcttcagcccaggatgtcgggctatgatcacaccactccactccagcactggtgacagagcaagaccctgtctcaaaatacaaagtaaagagtgttcagaagaaaaattgaacttctccaggcaaagaggggacagagagcagaaggcatgccagggaataagaattgcttgtgcaaagggccgtgcgtcagaaaaccccccccttttttttttttgagacggagtttcgctcttgttgcccagactggagtgcaatggctccatctcagctcacagcaacttccacctcccgggttcaacggattctcctgcctcagcctcgcgagtagctggcattataggcatgcaccaccatgcctggctacttttgtatttttagtacagatggggtgtttctacatgttggtcaggctggtctcgaattccccacctcaggtgatcctcccacctcggcctcccaaaagtgctggaattaaggtgtcagccaccatgcccggccagaaaaatccttttaaaaaggctgatgtaggctgggtgcagtggctcaagcctgtaatcccagcactttgggaggccaaggcaggcagatcatgaggtcagtagatcgagaccatcctgctaacatgatgaaaccctgtctctactaaaaatacaaaaaattagctgggcttggtggcgggcgcctgtaatctcagctacttgggagtctcaaaaaaaaaaaaaaaaggctgatgtagtagctagagtttaggagcagagacaacctggcctccgtggtcccaggtgagagggctgcgttcatggattgggactcctagcgtggtgagcaaaacgggactcaccgcagggtctggagcttgcacgtgggatgcctgaggccctcacacagcagcagcaccccgaggtcccccagctcattcaggctcaggtccagctctctcaggctctggttcacactgagagttgaggccagctcgtcacaggcagcagcagtgaggcggcagatcttcagcctgcacaaagtccaattcaacaagcattatggaggctttcctttctttttctttttttttttttttttttttgagacagagtcccactctgttgcccaggctggaatgcagtggtgcaatctcggctcagctgcatcctccacctcccatgttcaagcgattctcctgcctcagcctcctgaatcgctgggactacaagcgtgtggcatcacgcctagttagtttttgtatttttagtagagacagggtttctcgccatgttggctagggtggtctcgaactcctgaccatgggtgatatgcctgcctcagcctcccaaaggactggaattacaggcgtgagccactgcgcctaggcccccaatcttaacagtaatgcattttcagacaatctaatttaaaaatgggcaaaagggcccggcctggtggctcacgcctgtaatcccagcactttgggaggccgaggctggcagatcacctgaggtcgggagtttgagaccagcctgaccaacatggagaaaccccctctctactaataatacaaaattagactgggcacagtggctcatgcctgtaatctcagcactttgggaggctgagatgggtggatcacctgaggttgggagatggagaccatcctggctaacatggtgaaaccccgtctctactaaatacaaaaaattagctgggcgtggtggcgcatgcctgtaatcccagctacttgggaggctgaggcaggagaatcacttgaacccaggaggcggaggttgccgtgagctgagatcacgccattgcactccagcctgggcaacaagagtggaactccatctcaaataaataaataataaataaaaataaatgagcaaaaggcttgaatacacatttcttcaaggaaggtgtacaaatggccaaaaagcacctgaaaagatgctcaatctcaataatcattggggaaatacaaatgaaaaccacgataagatagcatctcatacccattaggatgcctactattaaaaataaatagaatgcggccgggcatggtggctcacgcctgtaatcccagcactttcgggggctgaggcgggcgggtcacgaggtcaggagatcgagaccatcctggctaacacggtgaaaccccgtctctactaaaaatacaaaaaattagccaagcgtggtggcaggcgcctgtagtcccagctactagggaggtcgaggcaggagaatggtgtgaacccgggaggcggagcttgcagtgagcagagatcacaccactgcactccagcctgggcgacagagcaagactctgtctcaaaaaaaaaaaagaaaactggggaagatggtacattttatgttgcatgtattttaccacaattaaatttactttttattttattagggacagggtctcaccctgtcacccagtctggggtacagtggcttgatcacagctcactgcagccttggcctccgaggctcctgaatagctgggactccagacacataccacccaccccagctaattatgtttattttttgtagagatgaagtctcactggttcccaggctgctcttgagctcctgcactcaagccattctcctgccttggccttccagagggttgtgattacagctgtgagccaccgcgccctgcccttctgaatatttttgatccatggttgatgaaattcacgaatgcagaacccgtggacacagagggctgactgtggctcagtggcatgaagtagtttcacgctactgggaaatcatcactgctatccatctctggaactttttttttttttgagacggagtttcgtttttgttgtccaggctggagtgcaatgacacagtgttggctcaccacaacctccgcctcccaagttcaagtgattctcctgcctcagcctcccgagtagttgggattataggcatgtgccaccacgcctggctaattttgtattttagtagagacggggcttctccatgttggtcaggctggtctcgaactccagacctcaggtgatctgcccacctcggcctcccaaagtgctgggattacaggcgtgaactaccgcacccggcccatctctggaactttttcatcttccgaaatggaacctctgctcccgttaaacggtaactccccatttcttcctgttctaggccttggcagccactattctactttgttttttgagatggagtctcactctgtcaccgtggctggagtgcagtgacgtgatctcagctcactgcaacttccgcctctcaggttcaagtgatcctcctgcctcagccccctgagtagctgtgattacaggcgtgtgccaccacatccagctaatttttgtatctttagtagagagggggtttcaccgtgttggccaggctggtctcgaactcctgacctcagatgatctgccctctttggcctcccaaagtgccgggattacaggcgtgagccactgcgcccgacctgtggatgcatttttataccatcattcaatatgaagagatttgccattttattatagttgaccccaggaagaactcaccacaaagtccgtagtctgcagactgggtgcctcagtccctggcatagtaacctcaggcccaaatcctccagtgcatttcctgtcaggtccaactcaaccagatgtgggttggtgccgagcacagaagccatctcctgacaagccccggactccagctgacacttcctcaaccttgggaggaaggagaggttgaaggggacgccatcttgcttttctatgtcgtgatcactcatgctccagcctgttattttattatttaggaacaggttgttgctctgtcacccagggtgaagttcagtggagtgatatcaactcgctgaagcctcgacctccaggctcccgtgatcctcctgcctcagcctcctgagtaactgggaatacatgtgtgcaccaccacacctgcctaattttttttgtttgtttgttttttgttttttttgggtttttttgtttttttttttttttgaggtagaacctcattctgtcacccaggctggagtacagtggcgtgatcttgcctcaccgcaacctccacctcctgggttcaagtgattttcatacctcagtctcgagtagctgggactacaggctgggctacaggtgtgtgccaccacgcccagctaagttttgcatttttagtagagacggggtgtttctccgtgttggccaggctggtctcgaactcctgacctcaggtgatccgcctgccttggcctcccaaagtgctgggattatagacgtgaaccaccgctcctggcccatacctggctaattaaaaaaaaaaaatttttgtaggtcgagtgcagtggctcacacctgtaattccagcactttgggaggccaaggtgggtggatcatttgaggtcaggagttcaagaccagcctggccaacgtgaggaaaccccatctctactaaaaatacaaaaaagttagctgggtgtggtggtgggtgcctgtaatcccagctacttgggagcctgaggcaggagaatcacttgaacgcaggaagtgggggttgcagtgagccgagattgtgccactgcaccccaacttgggcaacatagcaagaccccgtctcgggagaaaaaaagaagaggtgggggatggccccagggactcttcatcatgtagaattgagtgtggagtcagaggagggcagaagcaggtcttccaaagtgcctagagtccagggccagggtcttaggtcatggggttaagggccagccctgatttaaaggtggagatttggggattaccagcattttgtgatatttcatgccccaggagacaatgagcttaagaagttgctcccggggatagagactcactgaatcatctgcagcctgcactggggatgccgcaggccctcgcaaagcagcatcatgcctgggaatccaacgccgttgccactgagatccatccttgtcaaattcttattggctatgagagctgcagagaggtcctcgcaggctgagctggagatgcggcacctcttcagcctggggtggaaaagaggagaaaggagctggtcatttcttttgctccagttttgtggattattttcttttgcttttttttttttttctgagacagagtcgctctgtcacccaggctggagagcagtggcatgattttggcttaccacaacctctgcctcctgggttgaagcaatcctcctgccttggcctcctgagtagctgggcttacagacgtgtgccaccatgcctggctcattttggtatttttagtagagatggggtttcaccatgttggccaggctggtcttgaactcctgggtcaagtgatcctccccatctgggcctcccaaagtgctggaattacaggcgtgagccatcatacctggccaatatatttatttcaaaatatcatgttatatatgataaattttacctgtcaagaaaagcaacaagaacaatataaaatgttttgatgctttgtagtcaaatacattcacaaaggttgcccttaaagaaattcaaggccatgtgcggtggctcaagcctgtaatctcagcactttgggaggccgaggtgggtggatcacctgaggtcaggagtttatgaccagcctggccaacacagtgaaaccccatttctactataaacacaaaaattagctgggtgtggtgatgcacccctgtaatcccagctaatcaggaggctgaggcaggagaattgcttgaactcaggaggcggaggttgcagtgagtcgagatcatgtcactgcactccagcccaggctacagagcaatactatctcaaaaaataacatatgaaaaaaatttggctaggcacagtggctcacacctgtaatctcaacagttagggaggctgaggaaggaggatcacttgaggccagaagtttgagaccagtatgggcagcatggtgaaaccccatctctccaaaacatacaaaaattagcctggtgtggctgggcacggtggctcagtctgtaatcccagcactttgggaggccgaggtgggtggatcacgaggttagagattgagaccatcctggctaatatggtgaaaccccgtctctactaaaaatacaaaaaattagctgggcatggtggcacctgcctgtagtcccagctactcaggaggccgaggcaggagaatcgcttgaacccaggaggcagaggttgcagtgagccgagatcacgctactgcactccagcctggtgacaaagcaagactccgtctcaaaaaaaaaaaaaaaaaaaaaaaaagaaattagccgggtgtggttgcacatgcttgttttcccagctactcgtgatgctggagcaagaggatcgcttgagtccaggagtttggggctgcagtgagccatgattgtgccactgcactccagcctgggtgacagagcatatcagtgtctcaaaaatttaaaaaaaaaaaaagtaaaaaaaagaaaaaaatttggagacccacacagcaggatgaccatgtgaagacagaaggcagtgatctgcaggcccaggacagaggcctcagaagaacttaacctgcccactccttgtcttggacttccagcagccccccacctgccttgagaaaatagatttatgtggtgaagccacccagtctttggcacttttttcccccctgagatggagtctcaccgtatcacccaggctggagtgcagtggcacaatcccggctcactgcaacctccgcctcccaggttcaagcgattctcctgcctcagcctcccaagcagctgggattacaggcgcccgccaccacaccctcctgatttttgtattttttgtagagatggcattttgccatgttggccaggctggtctcaaactcctgacctcaagtgatctgcccgccttcacctgtcaacatactgggattacagacgtgagccacggcacctggctttgtgacacttttttatggcagccgtagccaacgaatacaccatcccgtgatagaacctttgtgactgatccccatgagaggccacggtggggaccacctgaaacgcccagaccagcctgcactcacctcaggttctgaagtttgcagttggggtgtctgagtccttgacagagcagcttcaccccccggctgcccagggcatttcggtacagagacagctctatcaggtttggattggtgcacagggccgctgccagatgttcactgtaggcgtccagcagaacggtcctctctggtctgcttgaaggaaagacaggccactctctggtgttactggtgcttgacaactatggcctttgcatgtcatttcaccgtttatgaagcatgctatccttttttgagacggagtttcgctcttgttgcccaggctggagtgcaatggcgcaatctcagctcaccacaacctccgcctcctgggttcaagcgattctcctgcctcagcctccagagtagctgggattacaggcatgagccaccacgcccagttaattttgtatttttagtagagatggggtttcaccgtgttggccaggctgatctcgtactcctgacctcaggtgatctgcccgcctcaacctcctgaagtgctgggattacaggcgtgagccaccacatccggccaaagcatgctatcttttcatttttttttttagagggccttgccctgttgtctaggctggagtgcatggtgagatcatggctcactgtaggcttgacctcccaggcttaagcaatcctcccacctcagcctactgagaagctggggctacaggtgtgcaccatcatgaccagctaatttattttatatttttagagatggggatctcatcatgttgtccaggctgcacctggctctatctgacgctcctaatcattgatagttggtttacttgtttccctctttattatctgtctccgttctcattaggatgcgtgctctcttgggaccattggcttattcacacagtcttctgtctacagaagattgttgggtccaccgataaaagggatatagaggctgggtgtggtggctcacacctataatcccagcactttgggaggctgaggccgagagtttgagaccagcctggccaacatggtgacaccccatctctactaaaaaaatacaaaaattagctgggtgtggtggcacactcctgtggtcccagctgctcaggaggctgagacacgcaaggtggaggttgcagtgagctgagattgtgcccctgcactccagccttggtgacagagccacactctctcaagaaaaagggacttagtaatatttgttgattgaataaattctcccagacatcgacctcaatttagtcccaatgggtgttgtttagtctttgtggcactattgacactttggggccagagggactgtcctgtgtactgtaggatgtttgcagcattcccggcctttatccactagatgtcagtagtattatttgcttcccagttgtgaccaccaaaaacgtgtctccaaacatcgccaaatgtcagagcaaaatcacccccagctgagaggcactggttaagagcatgaacctcaaggccaaggtgggtggatcacttgaggtcaggagttcaagaccagcctggctaacacagcgaaaccccatctccactaaaaatacaaaaattatcctggcatggtgatgggcacctgtaatcccagctactcaggaggctgaggcaggagaatcgcttgaacccgggaggcagaggctgcagtgagccaagattgcgccactgcacaccagcctaggagaccaagagagacttagtttaaaaaaaaaaaaaaaaaaaaatcgtgggccgggtgcagtggctcatgcctgtaatcccagcactttgggaggccaaggcgggcagatcacgaggtcaagagatcgagaccaccctggccaacatggtgaaaccctgtctctactaaaaatacaaaaattaggtgggcgtggtggcgtgcacctgtagtcccagctacttgggaggctgaagcaggagaatctcttgaacccgggaggcggaggttgcagtgagctgaggtcacgccagtgtactccagcctaggcaacagagcaaaaaaaaaaaaaaaaaaaaaaaacacacgaacctaagcagccccaggggataccccagggatacttacagctgcaccaacagcgtgtgcgctcctgcggagcacctcgcgcggtcttccccgtccgcgctgtaggtggcgccatacaagtgcagcacctgggcgctcctgcagcgcttcagacagaacgaggagaccatgtgctccatcttggaggcaatgttgctgaccacgatcacctggaagtggctcagggcctgctggataaactcctcctcctggatctcgtacaagcagctgaagaactccaaggagccctgctgcagggtggagccgtcgctctgagctttgctttggatccactgcaacaggtccatcttgatgtgcggcgagaccttccagcagagactcttctccaggtggctcctggtctcctcgttcaggagtccaaacaggaagcggctggtgagtgccaggaagctcctttcagaaaacgcgtactcggtcaacagcctggtcacgtcctggtctgggcctgccccgccctccccctcgtccaggatatagtacatagctgcaaagaattcctggaaactcaagtggatgaagctgtagtacctctcacagttgatgtccttctggaagatgttcatgttgaggaaggcagagacgtcttccccgtctaggccgtgcttccggaggtcctgctcctcaaataggattttctgattccagagcccatctgccgccaaggagcacaaccctctctggttgggtgggggctggaggcgcggggcccccggcttgggttgcatcagactcagcaggtagagcatgtacactgcagtggtggtcctggacgtctgtctcaacagccccccaccctccagctgctgctggaggcaggtacacaccacccagcacaccagggggacgaagcacatggtgaagagaggctcgttgtccctcacgtaattgaagacttggcccgcctgctctgcattgtggaaatacttgtagaagtattccttcctttctgcctcagagaagcccaggatctccacatgcctggggtgctccagcagacggtggagcttctccaaagccgtgggccgtgtggtgatgagcaaagatagctcagggagcagcttcttccgaattaagctgttaagaagcagctccgtgggccgtttctcctcccagcagaggcaccagggtccctgaggatcgtggaaagaaggcttgagctcatcgaagccgtcgatgatgaaaaggaggcgctcgggaactcggatgagctcctggagaggcgcgctgggctcaggccagcagctgaagatgaggtcttgcatgctgcattccgtggcactctggttcatctccctgcagttgatgtagaagagataatcaaatctgccttggaagagcttcccgtccgcccagtccagcatcaccttgtgtgccagcatggacttgcctatccctgccgcgccttgcatgaccacggtgcgcggtggctcggggcgctcctcgtctggctcaaagagggtctctatcttgatggggctagcctggtgtcccacggtcctcgcgtgtccccggcctgtgtccagaagctgctgctggacctgcatggggtttgagtgctccttcaccagcaggagccgggtgtaccggtggctgaggttgacacattcccctaggcgcgcattgcggtcttccatgagccggaatttcctgcggacatagtccctgtaggtttcctggggatctaggggagaggaatgaaggttttgtggaagactcatcagcagcctctaatgagttcacgaggtaaagcgctcctcatgtggctcaaagaaggtgtgtgcctgtagttccagctactcaggaggctgagatgggagaatcacttgaacccctgaggtggaggttgcagtgagctgagatcgcaccactgcactctagcctgggcaacagagccagactccatctcaaaaaaaaattttttttaattaaaataatttatttgttttgagactaggttataagactggctaattttttttttttttagatggagtctcgctctgttgcccagcttggagtgcaatggtgtgctccctgcaacatccacctcctgggttcaagtgattctccagtctcagcctcccgagtagctgggattacaggcacatgccaccaggcctggctaatttttgtatttttagtagagacggggtttcactatgttggccaggatggtctcgatctcttgacctcatgatctgcccacctcggccttccaaagtgctaggattagaggcatgagccactgtgtccagccccacaaagtgactttcagcaaaggatttatagaacgggtacattaccagatagtgcagacatgaatctgccttttttcaaagggggcacaagccaggtgcggtggctcacgcctgtaatcccagcactttgggaggtccaggtgggaggatcgcctgaactcaggagtttgagaccagccggagcaacatagtgagaccctgtctctataaaaacaaaagaaagagaaaacaaagggggcacagaaaacttgggagcagtgcttctcaaactttttttttttttcagtacagacagggtcttgctgtgttatccaggctggtctacaactactagcctcaaacaatcctcctgcctgagccccgcaaaatgctgagattacaggcatgaaccaccatgcctggctgtgcttctccaactttaagacgcatacatatcatgcagcaatcttgttagaaatgcagtccctgggctaagtgcagtggctcacacctgtaagagatcgccccactgcactccagcctgggcgacagcgtgagactctgcctcaaaaaaaaaaaaaaaaaatctagaacaatgttcttaattggggtgactgtgtcccctagttccccaggggacatttggcaacgggacaagtgggttggttgttacaactgggaaagtactactgccacatagtggatagaggccagaggtgctgctcaacatcccaggaaccacaggacgaccccatagcaaagaacgctctggccccgaaatgccaacagtgccaatgtggagaaaccctggtctggatacaaatgcatcccttggtattggatgccagcagaggcccatgatagctgcctgagagaagcttaaaaaaaagaatctgagtttgatactaaaattttcaaaacaaatatgtgtacttttaattatagtgacatacacataaaatttaccattttaaccactttaaagcgtacaactctgtgacactaagttcacgatgttgtgcaatcatcaatatctctttttttttttttttttgagacagagtgttgctctgtcccccaggctggagtgcagtggcatgatctaggctcactgcaaactccgcctcccaggctcaagtgattctcctgcctcagtctcctgagtaactcgatttacaggtgctcgccaccacacccagctgatttttgtatttttagtagagacggagtttcaccatgttggccaggctggtttcgaactcctgacctcaagtgatctgcccgcctcggcctctcaaagtgctggaattacagacgtgagccactgtgcctggccgccaatgtctatttccagaatgctttcagcattctaaacagaaactccatatccattaaatattaactcataatttctcctctccctggcaactgctattcttttttttttttcttttctttttttttttttttttttttgagacagagtcttgctctgtcacctgggctggagtgcggcggcacgattcggcttactgcaagctccgcctcccaggctcacaccattctcctgcctcagcctcccaagtagctcagactacaggtgcctgccaccacgcctggctaatttttttgtatttttagtagagacaaggtttcaccgtgttagccaggatggtctcgatctcctgacctcatgatctgcccgcctgagcctcctaaagtgctgggattacaggcgtgagccaccatgccgggcgtggcaactgctgttctactttccgcctctgaatttgactactctaggtgccttagataagtggaatcatacaatatttgtacccctctcccgcctttttttttgagacagggtctttctcactccccccaggctggagtgcagtggcgtgaccttggctcactgcaacttcaacctcctgggctcaactaatcctcccacctcagcctcctgagtagctggatctacaggcacaagtttccatgcccagctaatgttcgattttttgtttttttttgtagagatggggtcttgcttgttgcccaggctggtctcagagcctggcctcccaaagtgcagggattacaggcgtgagccaccttgctcagctggtgaacccactcttattctactttagtagagctggagactagattcatttcatgctccccttgaaaaaaatagccagaaacatttgtggcattgttaacagtgttgctgtctacccagcagactgtaccccggtttcttccctgccagcaaacctgattctgtttggttggtggatgctgattcatgactcgagtgagtggtgaatcctgccccttcacaagcctcagaggatgaattatggttttgctaaatcagtcatgagtaacctcgttcccctctgtcagtggttgctctgagaatgggcagattccccagtactgaccagtgggttacgtggatgtgactggtaacagggaggaagaaggcctttacccttcctttctttgctttttttttaagagatggagtctcactctgttgcccaggctggagtgcagtggtgcaatcttggctcactgcaacctctacctcccaggttcaagtgattcttctgcctcagcctctgagtagctgggactacaggtatgctccaccacaccctgctaattttgtatttttagtagagacggggttttgccatgttgtccgggctggtcttgaactcctgacctcaggtgatctgcccgctttggcctcccaaagtgctgggattacaggcgtgagccactgtacctggcctcttagccttccttgttgcccctgcgtgtatgagatggtttggtagccatctttcagccaggagatgacacgtgtcaggacaaaatgctgacgtggaaaggttgatgagttgaaacacaggaggaaactgcccctttgatggtgtcattaatccaccccacgaattcctcaatcacgcgtttgtggttggcctacactccgtggggtcagctgctctgtgtagatgaatacatgtaggtacatggcttgaggctcaccttttcttggagtgacaagagagacttccagaaggcatgttgactggttcccaagtgaggacgggccaccaggtggggtatctggaagagaaattgtggaagatgagctagcacgcatctggctagtagcaccgcgtcatattagctgcgattacgtcgaaatgcctgcataactccctggtcacccgcaccccagaatgttcagtagtgactgcataggccgtgtgtgggaaatagctcatcccttgttccttgtagcgcaccctcctccctgggtccccctcatggtcattggcacctccatccatccaatcagtctttttttttttttttttttttgagacggagtcttgctctgttgcccaggctggaatgcagtggcatgatctcggctcaccacaacctccacctcctgaattcaagcgattctcctgcctcagcctcacgagtagctggcattacaggtgtgcgccacaatgcctggctaatttttgtatttttagtagagacggggtttcactatgttggccaggctggtcttgaactcctgaccttgtgatccacctgccttggcctcccaaagtgctgggtttacagatgtgagccactgcacctggcaccaaccaatctttttgactgggaagttctgagtcagtctggactcctcccttgtcagctctgggccacatctcatccattatcttttcttttttcttttcgagacggagtctggctctgttgcccaggctggagtgcagtggcacaatcttggctcactgcaacctctgcctcccgggttcaagtgattctcctgcctcagcctcctgagtagctgggactacaggcatgtgtcaccacgcccggataatttattttgtatttttagtagagacagggtttcaccatgtgggtcaggctggtcttgaactcctgacctcgtgatccacccaactcggcctcccaaagtgctgggattacaggcgtgagccactgcgcctggcgactctgtctcttaaaaatattttaatttttttttttttttttggtagagattaggtctcagtatgttacccaggctggtctggaactcctagcttcaagcagtctttcgaccttggcctcttgaagtgttggaaatagtggtatgggccatcgtgcccagcccaaaaaaggccttcgtttggatatatcataagattctacacatcgagtccttccttggcatctttggtcctcagaaggccccccaaagtcctaagtgtgagttcctttgctctcactccatgagaaagtcttcccacctggctagttctcccatcagctgagccagcggcaccccatctggtcctcactctgataagttttcacctccctgctggttgctagtccatgaaatgattcatgaaagcaaagaacatccttttgaaggagccaggaggcaccccaccctcttgttactacacagcccgccccccccaacagtctctgtagcttcatgtgaccctcttggcatatggggacaccttccctgtgagtctgtgtgactaataaactgttgtctttcctctgttcagtgctggctctggtagattcagtcatctggcaccattttatttatttatttttatttatttgagacagtctcgctctgtcgcccaggctggagtgcagtggcgcgatctcggctcactacaatcttcacctcccaggtttaagtgattctcctgcctcagtctcccgagtagctgggactacaggcacccatgaccacgcaggtggtggtaaaaatacaaaaaaataatttttgtatttttagtagagatgcggtttgaccatgttggccaggctggtcttgaactcctgacctcaggtgatctgcctgcctcggcctcccaaagtgctgggattacaggcgtgagctactgcacccggccactcaaaaatttttaattggagaaggttatcattgagaggaaaggggaaaatagggaattgtttaatgggtatcgagtttgttttgcaagatgaagagttctgcagattgaatgcacatcagtgtaaatgtacaacactcagcagcacacttaaaaatggttaagagggccagggcgcggtggctcacgcctgtaatcccagcactttgggaggccaaggcgggtggatcacaaggtcaggagatcgagaccatcctgggtaacacggtgaaaccccgtctctactaaaaatacaaaaaaaaattagctgggcatggtggcaggcacctgtagtcccagcaatttgggaggccgaggcaggtgggattacctgatgtcaggagttcaagactagccttaccaacgtggtgaaaccttgtctctattaaaaatacaaaaatgagccaggcatggtggcgcgtgcctgtaatcccagctactcgggaggctgaggcaggagaatcgcttgaaccagggagtcagaggttgaagtgtgctgacatcgcatcattgcactccagcctggtgacggagcgagactccatctcaagaaagaaaaagtggttaagaggaggctgggcgcggtggctcatgcctgtaatccctgcactttgggaggccaaggtgggtggattacctgaggtcaggagttcaagaccagtctgaccaacatggagaaaccccatctctactaaaaatacaaaaattagctgggcgtggtggcagatgcctgtaatcccagctacttgggaggctgaggcaggataattgcttgaacccatgaggcagaggttgcagtgagccgagatcgcgccactgcactccagcctaggcaacaagagtgaaattccatctcaaagaaaaaaagaaaaagagggcaaatttcatgttttgtgtattttagcactatttatttatttatttatttatgagacagagtctcactgtgtcgtccaggctggtgtgatgttggctcactgcaacctctgcctccagggttcaagtgattctcctgcctcagcctccggagtagctgggattacaggcatgtacaaccacgaccagctaatttttgtatttttagtagagacagggtttcaccatgttggccaggctgttgtcaaattcctagtctcaagtgattcacgtgcctcagcctccaacatgctgggattacaggcatgagccactgcagctggttggcaatttttttttttttttgagagagggtcttgctctgttgctcaggctggagtagtgtggcatgatcttggctcactgcagccttcacctcctgggcttaagtgatcctcccatctcagcctcccaggtagctgggtctgcaggcatgcaccactgtgcctggtcaattttgtagagaaggggttttgccatgttgcctagaccagtctcaaacttctgggctcaagtgatctgcctgcctcagcctcccaaagtgctgggattataggtgtggccacattttttttttttaaaggtaatccaggccagcgcggtggctcacgcctgtaatcccaacattttgggaggctgaggtgggtggatcatgaggtcaggagattgagaccatcctggctaatatggtgaaaccccatctctactataaatacgaaattagccgggcgtggtggcgggtgcctgtagtcccaggtactcgggaggctgaggcaggagaatcgcttgaacccgggaggcggaggttgcagtgagccgagaacgcaccactgcactccggcctgggtgacagagtgagactccgtctcaaaaaaataaataaataaaaataaaaaaggtaattcttgaaaattgcagctgaaaaaggcctcagagatgttctccctcagtgtttcctaggcatgccgcgagaaccagccacatcaaaatgcagattcctgttgcctaagacctgctgattcagaatcacgggttgagggtcttggattccccattggccacaagtgtctcgagagactcttacgcacagtaacatgagaactgccgatcttgcctgatgcccttgttttacagatggagatggaggcccaggggcatatcgattctccagcatcacacagacagaaagagcaaagctagacatctgtctccttgggaacgctgagctgcctctcagtagactaaacggatgcagtccggggaagaacgctcggcaaatggttatgcattgtcaatgctgggagagatttaggcggaagagggagaaaagtgggactttacttttgattctatatttgtacattatttccatttcttaaaataactatgtaacacttccatttagatataattatacaatatgacaagtaagtaaattgatacttttttctttcttttctttttttgagatggagtctcgcttttgtcatccaggctggagtgcagtggcgtgatctcggctcactgcaacctccgcctcccgggttcaagtgattctcctgcctcagcctcccaagtagctgggattacaggcgtgtgccactacgcctggctaatatatatatatatatatatatatatatatatatatatatatatatatgtgtgtgtgtgtgtgtgtgtgtgtgtatatacatatgtgtatatatatgtatacatatgtgtatatatgtgtgtatgtatacgtatatatatgtatgtatacgtatatatatgcgtatatatgtatgtatacgtatatacgcatatatatgtatgtatacgtatatacgcgtatatatgtatgtatacgtatatatatacacatgtatacatatatgtatgtatacatatatatacacacacacacacgtatatatatatgtatgtatgtatattaagacggagttttgctcttcttgtccaggctggagtgcagtggcgggatcttggctcaccacaacctccgtctcctgggtggtggagaaaagggaaagagaaaaagagaggagagggagagaaaagaaaagaaaggaaggagggaaggaaagggaaaagaagggaaaagaaggaaggaaggagggaagaaaggctacaaacaagtgtctttggttttttcagtcattaaagactttgttttttacagagatgtttcccagcacactactactggcacacctcattaacgacgagtcattaagctttgcagaagtgactgtgtatatccagttattggcagggcttgcttactcattcagcaaatgttcaccaaagtttgctcggttcctagccccagccagacactggaatcgcagagaatcacacaggggagtcaagactctttctgcctttgaaggcgtccatgtcacagtagagaaaacaggtgagaaattacattaaaaaccacagctcaagcagggtgcagtggctcacgcctgtaattccagcattttgggaggccgaggtggatggatcacctgaggttaggagttcgagaccagcctgaccaacacggtgaaaccccgtctctactaaaaatacaaaaattagctgggtgtggtggcacgcacctgtagtcccagctactcaggaggctgaggcaggagaatcactggaacccgggaggcggagcttgcactgagccaagattgtgccactgcactccagcctgggcgacagagtgagactctgtctcagaaacaaaacaaaacaaaaaaccacagctcaaatggggctctgtggtgcacacctgtagttccagctgttcaagaggctgaggcaggcggatcacttcagcccaggagtttgagtctagcctgggcaacatagtgagaccctatctctaaaaaataaattattttttttttttttgagacggagtcttgcactgtcacccaggctggagtgcagtggcacaatctcagctcaccgcaagctctgcctcccaggttcacgccattctcctgcctcagcctcctgagtagctgggactacaggcgcccatcactgcgcccagctaattttttgtaaaaaataaaaatatttttaaaaaaacaattccacagctcaagtgccatctctgccacttcagcaatagcctatatttgctgagcacttgctacctgctctgaattgtgttaagcactttgcatgtattatctcttgagcttatgcctgagtataaatcatattttttcttttttttttttttttttttttgagacagagtcttactctgtcacccaggctggagtgcagtggcttaatcttcgctcactgcaacctccaccgcctgggttcaagtgattctcctgtctcagcctctagattagcagggattactggcgcccgccaccacacccggctaatttttttgtatttttagtagagacagggtttcaccatgttggccaggctggtctcgaactcctgacctcaggtgatccatccacctcaatctcccaaagtgctgggattacaggcgtgagccaccgcacccagctcattgtgattattttatgagatagaagatataataaaagaaatcatgttggctgggcacggtggctcacacctgtaatcacagcactttgggaggccgagacggctggatcatgaggtcaggagatcgagaccatcctggctaacatagggaaaccccgtctctattaaaaatacaaaaaattagccaggcatggtggcgggcacctgcagtcccagctactcgggaggctgaggcaggagaatggcgtgaacccaggaggtagagcttgcagtgagctgagattgcgccactgcactccagcctgggcgacagagcaagactctgtttcaacaacaacaacaaaaagaaatccaagagtgctaaggaggcacagaagtggggtttctgagccagccagagtggtgggagcgaggaatcagaaggagtgggggaagaggagtaaatactttactttagagaaggtagtggcttcaaggtttcagtaagtaatacttttccaggcaaagaagatggagaatattccaggcagaacacagcatgaacaaagaccaaagggatgaaattagaattctgtacacagtcataaaaaagaacaaaatcatgttctttgcagtaacatggacgcagctggaggccattatccaaagcaaactaatgcaggaatagaaaaccaaagactgcatgttctcacttataagtggaagctaaacattgggttctcatggacagaaagatgggaagaagagacactggggactcgtggcggggagaaatctcaccattgggtactattactatgttcaagtacctgcatgataggatcaatcttactctgaatctcagcatcactcaatatacccatgtaacaaacctgcacatgtaccccttgaatctaaaagttgaaatttttatatagatatagatgtgtgtgtacgtaaattagaattccagatctcccaggctcagggattagtatgaaagaaaagggaattggtggccaggcagtggtcattcatgcctgtaatcccagcactttgggaggctaaggtggaagctcgcttgagcccaggagttcaagaccagcccgggcaacataaggacacctcatcttggccgggcacagtggcttatgcccgtaatcccagcactttgggaggctgaggtgggtggatcacgaggtcagaagttcaagaccagcctggccaagatagtgaaaccccgtctctacaaaaaatacaaatacaaaaaattagccaggcatggtggcaggtacctgtaatctcagctactcgggatgctgaggcagaaaattgcttgaacctgggagacggaggttgcagtgagcggagattgcgccactgcactccagcctgggcaacagagcgagactcagtcttaaaaaaaaaaaaaaaaaaggatacctcatctctttcttaatttatttttgagatggggtttcactctgttacccagcctggagtacagtggtgcaatctcaactcactgcaatctccacctctcaggttcaagcgattctcctgcctcagcctcccatgtagctgggactataagcgtgtgccaccacgcctggctaatttttgtatttttagtagagacagggttttgctatgttggccagactgatctcgaattcctgacctcaggtgacccacccgccttggcctcccaaagtgctgggattataggtgtgagccactgcacctggctacctcatctcttaaaatatatatacacacacacatatacacacacatatatatacacatatatacacatatatatacgtgtgtgtatatatatataaattccagatctcccaggctcagggattttatatatatgtattttaaatatttattttaataatatatgtattaaatatttaatatataatatttattatttatatatatttatataatataccatatttatataatatagtatatttatataataaatatatactatatttatatataatatataccatatttaatatatatttaataatataattatatacatattttaaatatatatttaaaatatatgttttaaatatatatatttaaaatatatgttttaaatatatattttaaatatatatttaaaatatatattttaaaatatatttatttaaaatatatatttaaaacatatattttaaatatatatattttaaaaaaatatattttaaatatttgaggcaaggtctcgttctgtcacctaggctggggtgcagtggcaggatcatagctcaccgcagcctcgaccttctggtctcaagtgatcctcccacctcagcctcctgagaagctgggatcacagacgtataccaccacacctggctaattttttttatttttggtagagacagagcctcactatgttgtccagactggtcttgaactcctcacctcaagtgatctgccctcttcagcctcccaaagtgctgagattacaggtatgagtcactggacccggctggcattctagccttgcctgtcccgccacctccttacccctcaccaggtcctctctctgtcctctctcccacaggtccttcctgtttatccgctcaaaggtgctgagagccaacctccaggcctcctctggcccgaagtgggtgatgagcagctgggccatttccaggggaccggccttctccatgcttccccaggggatcttgccttctcccagctctgtcgcggtccccaggtataacttgaacttcttcagttccacagcctcgagttcttccaagtaggtggacaggcgacagaggccgtccctgcctgcggttcgtagcatgggggtgccgtgagccccaaaggagaggacctggaggctgagatgctcctatgcacgggacacagggcgaccccagcacaccttccattgcatcattcacaggcagcgggcggagaggctgagccagtggttggaggagagagcaagggaggaaagaccttttgctgaaataatgctttctcactcttcagttccctcctgccctgccccactcaccaatggctgttctgggtggagaagaggaagttcggggggagattaagaaatccgaggagccacttggctgatgaaaaagattttcacttctgctgtctcttcctggatctcttgacaaaacagtcactctctttccgctttcctcttgttttcctcatttcactagtgtgtgtggtagagtgtattatcaaaactgcgactgcgcctcttccagggagaatttttttttttttgagacagagtcttactctgtggccctggctctgcgatcttggctcaccgcaacctctgcctcccaggttcaagcgattctcccacctcagcttcccttgagtagctgggattacaggcgccggacaccacacccagctaatttttgtggttttagaagagacagggtttcaccatgttggtcaggctggtctcgaactcctgacctcaggtgatccacccgcctcagccttccaaagtgctaggattacaggtgtgagccaccgtccctggcttttttttttttttttttctttgagtcagagtctcactctgccacccaggctagagttcactggcgtgatctcagctcactgcaacctccgcctcccaggttccagcgattctcccacctcagcctctcaagtagctgggaccacagacatgcgccaccatgcccagctaagtttttgtagttttggtagagacaaggtcttcttatgttgcccaggctggccttgaactcctgagctcaaacgatccgcccacctcagccttccaaagtgctgggattacaggcatgagccactgagcccagcctcagggagaattattaaggacctcacgtaggtctgctattttttttctgttctctcagtcacaagagtggcatgagagggactttgcggtaggcaggatgatggtccccaaagatattcatgtcctaatggccagaacctgtgacatttcaccctacatagcaaaagagacttagcatatgtgaccaaatgaaggcacttcagatggggacattatcctggttatctgggcaggacccatggaatcacaagagtcttttttttgagacagagtcttgctctgttgcccaggctggagtgcagtggcacgaactcggatcactgcaagctccgcctcccaggttcacaccattctcctgcctcagccttccgtatagctgggactacaggtgcccgccaacacgcctggctaattctcttttttttgtatttttagtagagatggggtttcaccatgttagccaggatggtcttgatctcctgacttcgtgatccacctgcctcagcctcccaaagtgctgggattacaggcgtgagccaccgcacccagccacaagagtctttataagaagaagacaggagggttagtgtaagaggaagatgtgactgggtgcaatggctcatgcctgtaatcctagcacttggggaggccaaggcaggtagatcacctgaggccaggagtttcacaccagactggtcaacacagtgaggccccatctctacaaaatatgtgttagcagaatttatgaattctgatggaagagcaagtttataattccctctgtctcctgcatcatgccaactttgtttcatgctcctaatcaattaagacccctcagacacacacacacacacacacacacacacacacacacacacacacacacaaaagccttcatagccaggcgcagtggctcacacctgtaatcccagcactttgggagactgaggcgggcagatcacctgaggtcaggagtttgagaccagcctggccaacatggtgaaaccccgtctctactaaaaatacaaaaattagccgggcttggtggcacgcacctgtaatcccagctacttgggaggctgaggcaggagaatcacttgaacccgggaagcagaggttgcagtgagccgagactgcgccactgcactccagcctgggcaacagagcgagactctgtctcaaaaaaagaaaaaaaaaattagctggggtttggtggcgggtgcctgtagtcccagctactcaggaggctggggcaggaaaatcacttgaactcaggaggcggaggttgcaatgagccaagatcccgccattgcactccagcctgggtgacagagtaagactccgtctcaaaacaaaacaaaaaaaaccttcacagctttttatgagacattctcccacatccagtcccttccaggactaatattctgttgcatggcatgcagcagttttgagcaggggagggatggagtcaggtctgggttaaggaagattcctcaaggcccttgtggaaggcagaccaaacagaggaggcctggattgggagagcgagaagctgaagccttcatgtttcaggagatggagataatgcctgagtaagggcaggcggtgggtgcatcctgggagtgtggggatggcagtgatcattagaggggaggagaaaggtttggcaaacctgaactacctacagaccccatctgagcttcctcaagtggctcacgacgcaggctccttccacgccactgctgcaggtggtggtaaaactaatttctaggaattcggaagcgaggcttgggggaagctgaatccacatctgtctacttcatgcttccactttcaagatagaactttctcatggggaaagaagagaattggcaacttctatagctgcttctgggcttagtgccatttctggaaacacaagaatgaatctaaagacaaggaatgccattttcctttttttttctttttttttttttgtttttagtagatggggtttcaccatgttgcccaggatggccttcaactcctgagctcaagcgatcctcccacctcggcctcccaaagtgctgggattacaggcatgagacaccgcacccagcccaattttccttttttaaaaaatttttttgctgggtgcagtggctcacgcctgtaatcccagcattttgggaggctgaggcgggtggatcatttgaggtcaggagttcaagaccagcctggccaacatggtgaaaccccatctctactaaaaatacaaaaataacctgggtatggtggtgggcacctgtaatcccagctacttgggaggctgaggcagaagaatcacttgaacccaggagtggaggttgcagtgagccgagatcacatcactgcattccaggctgggtaacagagacaccatctcaaataaataaataaataaataaataaataatagaagttgtcaccaccacctgcttgccactcccttgaattctttcctgtgtgaagccaagaactatcccggggtaagccctgttttggggcctcacttgcctagcatcacaaggataaacccattcaaagcaggtgctaatttgccctgttggttttcaactagaagagaaattattatcatcagggacatttataaaaattatatatagaaggctgggtgtggtggctcacgcctgtagtcccagcactttcggaggccaaggtgggcagatcacttgaggtcaggagtttgagaccagcccggccaacatggcgaaaccccgtctctactaaaaatacaaaaattagccggatgtgctatcgcgcacctgtaattccagctactcggggggctgaggcacgagaatcacttgaaccttggaggtggaggttgcagtgagccgagatcacgccactgcactccagcctgggtgactgagtgagactctgtctcaacaacaacaacaaattaaaaataaaaaaataaataaaaatacaaaaattatccaggcatggtggcgtgtgcctgtaatcccagctactcgggaggctgtggcaggacaatctcctgaacctgggaggcggaggttgcagtaagccgagatcacaccactgcactccagcctgggccacagagtgagactccgtctcaaaaaaaaaaattatatatagatgaaatattttatatacattacaataagaattataaatatataaatatgtatatgaaattggtccctctctagacttcctgaatcaggatcttggtggggcaggggccatcaaacatatgtttctttttcctttttttcttatattaattttttgaatagagatgaggtctcactatgttgcccaagctggtctggaacacctgagctcaagtgatcctcccacctcagcctcccaaagtgctgggattacaagtgtgaaccaccacgcctggctaaatacatgtttttataatataaagctcccctagtgattctgctgagaaacatttctctgtgttagtactagaaaggcacagagaaatgcttgtttttctatcagcagaatttcccttttgccattccggaagagacctgtttcctttgagggaatactttgagaagtcacttgagtatgaaatctgttaactggagaaattttgcagtatggtgtttgcttgtttgcaggtaaaactaaatcattcaggataaaaaggcattttagaagccacgtggggaaaggcagaaggaaaggaaataggaggtgtcaggtgcctgggaagaacatttggagggtttatggagatgagtaataggaatttaaattgctttactatatggtgtacgatgaaaactgtcttctaccccaaccaaacccatcatcagtaaaacctatgctgctcgctagcacgttgtgaacatggatttgctgcgtttttttgttttgtttttttgctttttctgagacagtttcgctctttctgcccaggctggagtgcaatggcgccatcttggctcactgcaatctcctcttctcgggttcaagcgattctcgtgcctcagcctccaagtagctgggaccacaggcgcgtgccactacacccggctaatttttgtatttttagtagagacagggtttcactgtgttggtcaggctggtctcaaactcctgacctcaggtgatctacctgcctcggcctcccaaagtgctgggattacaggcgtgagccaccatgcctggcctgatttgcttttacaggcagtgtgacaaaatggtgtctctaactggcattgaatgactgtcccgtgggaggccacatctgaggtttctgtgcctctttgttgtcacatagagaggataccgagtgctacccactgttcccatgaccatcaccagcatcactagctcaccacgaactggctagaaaatggaaatcatcattctccacctatgaatggggaaactgaggctgagagggaagctctgagtgtgtggcctacacagcagtgctggaaaatgatggagacgactctgaaagccagttctggctccaaacttcaagcagctaaaatcctcatcagcttgtacaatgaggccaaccctccaatttgaaagagggatagactgaggtccaaagtagcaaagtcacctgcagaccatcatatagcactcaaaagttgcccaggggctgctaggatgcagtcttcttcttcctttttttttttttttctaatgagatggagtcttgctctgtcacaaggctggagtgcagtgatgttatctcagctcactgcaacctccacctcctgggttcaagcaattctcctgtctccgcatcccgggtagctgcgattacaggcacctgccaccactcccagctaatttttgtatttttagtagagacggatgatctcgatctcctgacctcgtgatccacccgcctcggccttccaaagtgctggggttacaggcgtgagccaccgcgcccagccacagtcactttcatcagggcctgagtgtaggggttgtgaaacttcctcccctgtgagctatgtcctcacttttaccacagaccctggcaggaaacatcctggctgtgactttccctgtgggttttaggaacagttgcacagggtccagccccaccacaggctccactacccttgccctgatcaatcgggaagattcagccacagctgatggtactaaaactttggtttttttttttttttgagatggaatctcactctgttgcccagactggagtgcagtggtgccttctcagctcactgcaacctccgcttcccaggtttaagtgattctcatgtctcagtctccgcagtagctgggattacaggcacccaccaccatgcccggctaagttttgtatttttagtagagatggggtttcaccatgttggccaggctggtctcgaactcctgacctcaagtgatctgcccgccttggcctcccaaagtcctgaaattacaggcatgagccacctcactcagccggatgatacttaaaacttagtatcagggagaagtaggtggcacttaaagaaaatgtattatgttccttccttctcagaccaataatctccctctgtattagctaagtttcctcagagaaacagaatcaatggaagggagacatccacacacagagagttagagagaaagggatttattatggggactggctcacaggcatgcagagccctaggagttgcaccatctgccagctgccagctgtagaagcaggaaagctggtgtggaattcactccaggaccaaaggcctgggaaccaggagctccgatgtcctagggcaagagaagatggactttccagtttaaaaaaagagggcaggctgggcgtggcagctcacgcctgtaatcccagcactttgggaggccgaggtgggcagattacctgaggtcaggagttcgagctccacctgaccaacatggagaaaccccatctctactaaaaatacaaaattagctgggtgtggtggcacatgcctgtaatcccagttactcgggaggctgaggcaggaggatcgcttggactcaggaggcggaggttgcggtgagccaagatagcaccatagtactccagcctgggcaaaaaaaagggcaggccgggcgcagtgtctcaaacctgtaatcctagcattttgggaggatgagccaggaggattgctcgagcccaggagtttgagaccagcctgggctgtcaggcctctgagcccaagccaagccatcgcatcccctgtgacctgcacgtatacgcccagatggcctgaagtaactaaagaatcacaaaagaagtgaatatgccctgccccaccttaactgatgacattccaccacaaaagaagtgtaaatggccggtccttgccttaactgatgacattaccttgtgaaagtccttttcctggctcatcctggctcaaaaagctcccccactgagcaccttgcgacccccactcctacccaccagagaacaaaccccctttgactgtaattttcctttacctacccaaatcctataaaacggccccacccttatctcccttcgctgactctcttttcggactcagcccacctgcacccacgtgaaataaacagctttattgctcacacaaagcctgtttggtggtctcttcacacggacgcgcgtgaaatttggtgccgtgactcggatcgggggacctcccttgggagatcaatcccctgtcctcctgctctttgctccgtgagaaacatccacttacgacctcaggtcctcagaccgaccagcccaagaaacatctcaccaatttcaaatctggtaagcggcctctttttactctcttctccaacctccctcactatccctcaacctctttctcctttcaatcttggcgccacacttcaatctctcccttctcttaatttcaattcctttcattttctggtagagacaaaagagacacgttttatccgtgaacccaaaactccggcgccggtcacggactgggaaggcagccttcccttggcgtttaatcattacagggacgcctctctgattatacactcacatttcaagggtgtcagaccacgcagggacgcctgccttggtccttcaccctcagcggcaagtcccgctttcctagggggcaagaaccccccaatcgcttatttccgcaccccaacctcttatctctgcgccccaatcccttatttccacaccctgacctcttatctgtgtgccccaatcccttatttccgtgccccaaccccttctctgctttcctggagggcaagaaccccccaccccttctccgtgtctctactcttttctctgggctttcctccttcactataggtaagtttccaccttccattcctccttctcccttagcctgtgttctcaaaaacttaaaacctcttcaactcacacctgacctaaaacctaaatgccttattttcttctgcaatgccgcttgaccccaatacaaactggacagcagttccaaatagccggaaaacggcactttcaatttttccatcctgcaagatctaaataattcttgtcgtaaaatgggcaaatggtctgaggtgcctgacgtccaggcattcttttacacatcagtcccttcctagtctctgtgcccagtgcaactcgtcccaaatcttccttctttccctcccgcctgtcccctcagtaccaaccccaagcgtcgctgagtctttctaatcttccttttctacagacccgtctgacctctcccctcctcgccaggccgagctaggtcccaattcttcctcagcctccgctcctccaccctataatccttctaccacctcccctcctcacacccggcccggcttacagtttagttccgcgactagctcctccccacctgcccaagaatttcctcttagagaggtggctggagctgaaggcagtcagggtacatgtacctttttctctatcacgcctctctcagatcagtcaacgtttaggcactttctcatcagaccccactaaacatatacaggaattccaatatctaactctgtcctacaacaacctggagtgacttaaatgtcatcctgacttctaccctctccccagatgaacgggaaagagtttgttctctagcccaatctcatgctgctaaccactggcttcatgagccagacctccaggaaggcattagagcagttccccgagaggatccccagtggaactaccaggcaaattccccaggtatagctaggcgagattacatggtttcctgcctagttgaagggcttaaaaaagcagcttacaaagctgttcattatgacaaacttaaagaaactacccaaggtaaagatgaaaacccagcccaggtcatggctcgtttggcagcaacctttagacgctataccgccctagaccctaaaaggtcaaaaggccgtcttattctcaacatacattttattacccaatctgctcccgacatgaaataaaactccaaaaactggaatctggccctcgaaccccacaacgggacttaattaacctcaccttcaaggtgtgtaataacagaaaaaagttgcaattccttgcctccactgtgagacaaaccccagccacatctccagcacacaagaacttccaaatgcctgaactgtagcagccaggcgttcctccagaaccttcttcccccaggaacttgctacacatgctggaaatctggccactgggccaaggaacgcccgcagcccgggattcctcctaagccgcgtcccatctgtgtgggaccccactgaaaatcggactgttcaactcacctggcagccactcccagagcccctggaactctagcccagggctctctgactgactccttctcggcttaccggctgaagactgatgctgcctgatcgcctcagaagccccgtagaccatcacggatgccgagctttaggtaactcacagtggagggtaagtctgtccccttcttaatcagtacggaggctacccactccacattaccttcttttcaagggtctgtttcccttgcctccataactgttgtgggtattgacagccaggcttctaagcctcttaaaactcccccaattctggtgccaattagacaatactctttcaagcactcgttttcagttatccccacctgcccagttcccttattaggctgagacactttaactaaattatctgcttccctgactgttcctggactacagctatatctcattgccgcccttcttcccaatccaaagcctcctttgtgtcctcctcttgtatccccccaccttaacccacgagtataagatacctctactccctccttggcgaccgatcatgcaccccttaccatctcattaaaacctaatcacccttaccccactcaacgccaatatcccattccgcagcacgctttaaaaagattaaagcctgttatcactcgcctgctacagcatagccttttaaagcctataaactctccttacaattcccccattttacctgtcctaaaaccagacaagccttacaagttagttcaggatctgcaccttatcaaccaaattgttttgcctatccaccgcgtggtgccaaacccatatactctcctatcctcagtacctgcctctacaacccattattctgttctggatctcacacatgctttctttactattcctttgcacccttcatcccagcctctcttcgctttcacttggactgaccctgacacccattaggctcagcaaattacctgggctgtactgccgcaaggcttcacagacagcccccattacttcagtcaagcccaaatttcatcctcatctgttacctatctgggcataattctcataaaaacgcacgtgctctccctgccaatcgtgtcctagtgatctctcaaaccccagcaccttctacaaaacaactcctttccttcctaggcatggttagcgtggtcagaattcttacacaagagccaggactgcaccctgtagcctttctgtccaaacaacttgaccttactgttttagcctagccctcatgtctgcgtgcaggggctgccgctgcattaatacttttagaggccctcaaaatcacaaactatgctcaactcactctctacagttctcataacttccaaaatctattttcttcctcatacctgacgcatatactttctgcttcccggctccttcagctgcactcactctttgttgagtcccacaattaccattgttcctggcccggacttcaatccagcctcccacattattccaggtaccacacctgacccccatgactgtatctctctgatccacctgacattcacctcatttccccaaatttccttctttcctgttcctcaccctgatcacgcttgatttattgatggtggttccaccaggcctaatcgccacacaccagcaaaggcaggttatgctatagtacaagccactagcctgcctcttagaacctctcatttcctttccatcgtggaaatctatcctcaaggaaataacttctcagtgttccatctgctattctactactcctcagggattattcaggcccccctcccttccctacacatcaagctcgaggatttgccccactcaggactggcaaattagctttactcaacatgccctgagtcagataactaaaatacctcttagtctagataaatactttcactggataggtagaggcctttcctacagggtctgagaaaccaccgcagtcatttcttccctcctgtcagacataattcctcagtttagccttcccacctctatacagtctgataacagatgagcctttattagtcaaatcagccaagcagtttttcaggctcttagtattcagtgaaacctttatatccctacggtcctccgtcttcaagaatattagaatggactaaaggtcttttaaaaacacacctcaccaagctcagtcaccaacttaaaaaggactggacaatacttttaccactttcccttctcagaattcaggcctgtcctgggaatgctacagggtacagcccatttaagctcctgtatagacgctcctttttattaggccccagtctcattcgacaccagaccaacttagactgtgccccaaaaaatacttgtcatccctactatcttctgtctaatcatactcctattcaccattctcaactactcatacatgccctgctcttgtttacacggccggtttacactgtttttccaagccatcacagctgatatctcttggtgctatccccaaactgccactcttaactcttgaagtaaataaataatctttgctggcaggactatgctgaatctccttaggcactctctaatcagatatcctgagtcatcccaattcttagaccttttatacctgtttttctccttctgttattccatttagtttttcaattcatacaaaaccgtatccaggccatcatcaatcattctatacgacaaacgtttcttctaacatccccacaatatcacccctcaccacaagacctcccttcagcttaatctctcccactctaggttcccacgccgcccctaatcccgcttgaagcagccctgagaaacatcgcccgttctctctccataccaccccccaaaaatgttcgccgccccaacacttcaacactattttgttttatttttcttattaatataagaaggcaggaatgtcaggcctctgagcccaagccaaaccatcgcatcccctgtgacctgcacgtatacgcccagatggcctgaagtaactaaagaatcacaaaagaagtgaatatgccctgccccaccttaactgatgacattccaccacaaaagaagtgtaaatggccggtccttgccttaactgatgacattaccttgtgaaagtccttttcctggctcatcctggctcaagaagctcccccactgagcaccttgcgacccccactcctacccaccagagaacaaaccccctttgactgtaattttcctttacctacccaaatcctataaaacggccccacccttatctccctttgctgactctcttttcggactcagcccgcctgcacccatgtgaaataaacagccatgttgctcatacaaagcctgtttggtggtctcttcacacggacgcgcatgaaatgggctacatggagaaaccccatctctacaaaaaatacaaaattagttgagcatggtggcacagtcccagctactcgtgaggctgaggtgggagcatcacctgagcccagtaagtcaaggttgcagtgagctgtgatcgcaccactgcacttcagccttggcaacagagtgagaccgtgtctaaacaaacaaaaacaaaacaaaaaaacacccaaaaacagaaagggcaaatttgcccttgttcacttggccaaggtcacacagccatgaggtacaggggcaaacaatggacttgggccacactaatcgcagccgtcacccctactctgtcacatacaggcatctgtgtaaaaataaaataaaattacaattacaaaaataaagtagggccaggtgcgatggctcatgcctgtaaccccagcactttgggaggccgaggcgggtggatcacaaggtcaggagttcaagaccaccctggccaatatggtgaagccccgtctctactaaaaacacaaaaaaattagccgggtgtggtggcgggcacctgtaatcccagctactcaggaggctgaggcaggagaatcacttgaacccagaaggcagaggttgcagtgagccaagatcgtgccactgcactccagcctgggcgacacagtgagactctgtctcaaataagtaaataaataaaataaaatcaaaatagacctaccatttgatgcagcaatcccactcctgggtgtctacccagcggaaaagaagtcattatacagaaaagatacttgcacacacatgttcattgccacaatttgtaattgcaaaaatatggaaccagcccaaatgcccatcaatcaacgagtggataaagaaaatgtggtatatatatatatatatatgccatggaatactattcagccataaagaggaacaaaataatggcattcacagcaacctgggtggaatccgaggctattattttcagtgaagtaactcaggaatagaaaaccaaacatcacatgttgttactcataagtgggagctaagctatgaggtcgcaaaggcataagaatgatacattgaactctggggacttggggaaaaggtgggagtaggggtgatggataaaagagtacacatttggcatagcgtgccctgctcgggtgatggatgcaccaaaatctcagaaaacaccactaaataacttattaatgtaaccaaacaccacttgctccctaagactctattgaaataaaaaataagggccaggcatggtggctctgtggggaaaagcaagagagatcggattgttactgtatctgtatagaacgaagtagacataggagactccattttgttctgtactaagacaaattcttctgccttgagatgctgttaatctatgcccttacccccaaccccatgctctctgaaacatgtgctgtgtccactcagggttaaatggattaagggcggtgcaggatgtgctttgttaaacagacgcttgaaggcagcatgctccttaagagtcatcaccactccctaatctcaagtacccagggacacaaacactgcggaaggccgcagggacctctgcctaggaaagccaggtattgtccaaggtttctccccatgtgatagtctgaaatatggcctcatgggaagggaaagacctgaccgtctcccagcccgacacccgtaaagggtctgtgctgaggaggattagtaaaagaggaaggcatgcctctttgctgttgagacaagaggaaggcatccgtctcctgcccgtccctgggcaatggaatgtctcggtgtaaaacctgattgtatgttccatctactgagataggggaaaaccgccttagggctggaggtgggacatgcgggcagcaatactgctccgtaaggcattgagatgtttatgtgtatgcatatctaaagcacagcacttaattctttaccttgtctgtgatacagagacctttgttaacgtgtttatctgctgaccttctctccactattatcctatgaccctgccacatccccctctctgagaaacaccccaaaatgatcaataaatactaagggaactcagaggccgggggatcctccgtatgctgaacgctggtcccctgggcccccttatttctttctctatactttgtctctgtgtctttttcttttccaagtctcttgttccacctaacgagaaacacccacaggtgtggaggggcaacccaccccttcatgctcacgcctgtaatcccagcactttgggaggccgaggtaggcggattacctgaggtcaggagtttgagaccagcctgaccagcatggagaaaccccgtctctactgaaaatacaaaattagctgggtgtggtggcgcatgcctgtaatcccagctactaggaaggctgaggcaggagaatcacttcaacctgggaggcagagggagtggtgagccgagatcgcgccattgcactcgagcctgggcaacaagagtaaaactctgtttaaaaaaaaaaaaaaattaaggccgggtgcggtggctcacgcctgtaattccagcactttgggaggccgagacgggcagattacctgaggtcaggagtttgagaccagcctggccaacatggtgaaaccctgtctctattaaaaatacaaaaattagcccggcgtggtggtgggtgcctgtaatcccagctactcgggaggctgaggcaggaggattacttaagcccaggagacggaggttgtagtgagccgagatcgtgccactgcactccagcctgaccgacagagtgagactctgtctgaaaaaaaaaaaaaattatataaatcaatacaaataaagttaatgtattttatttaacccactatatccaaaacattattatttcatgcaatcaatatgaaaaggttattcacgaattacttttcattcttttgttcttgttgtttttaaattaattctttttttatttttatttttttttgagatggagtcttgttctgtcgcccaggctggagtgcagtggcgcgatgttggctcactgcaatctctgcctcccggaatctagcgattctcctgcctcagccttctgagtagctgggattacaggtgtgcgtcaccatgcctggctaatttgttgtgcatttttagtagagatggggttttgccatgctggtcaggctggtctcgaactcctgacctcaggtgatccgcccgcctcagccttccaaagtgctgggattacaggcgtaaaccaccgtgcctggcctaaattaatactttaaattaattaaaatgcttttaaaaagtccagaacaggccgggagcggtggctcaagcctctaatcccagcactttgagaggccgagttgggcagatcacctgaggtcaggagttcgagcccagcctggccaacatggtgaaaccccgtctctactaaaaatacaaaaatcagctgggcttggtggtgcatgcctgcaatcctagctactcgggaggatgaggcaggagaatccctttaacctgggaggcagaggttgcagggagccgagattgtgccattgcactccagcctggacgacagagcaagacaacatctcaaaaaaaaaaaaaaaaaaaacaagaaagaaaaactaaaatggtaccatgttttgcgtttttattttttttattcttagttgtttttttttttttttttgagacatgatctcactctgtcacccaggctggagtacagtggtgcaatcatgactcactgaaacctcaaaactcctgggctccagccatcctcctgcctcagtctcctgagtagctggggtttcaggcacgtaccagcacatctggctaatttctttttttaatttttagtagagatgaggtttcactatgttgcccaggctggtctcaaactcccgggctcaagcaatcctccctccttggcctcccaaagtgctgagattacaggcgtgagcaactgtgcttggtccaaattggtattacgttttcaattcaggcttcagatagaaggtaccctagttttattgccaagaagagatataatttctataaaacaactctcctatctagctagttttaggaacactcctactggtcaaagtatataaaactaaggggaccagagttagctgtaacgaccttgggctccacatatgcctgtacttaagaaaattaatgaacattcttggaaggtggaatgcatcttttacacctgagcaaattgaggcttgggttacacagctctgcctggcgcatgtgatttattttctctctctttttgtttttaagacctagtcttgctctgttgcccagactggagtgcagtggcatgatctcagctcactgcaacctctgcctcccgggttcaagcaattctcctgcttcagcctcccgagtagctgggattacaggcgcccgccaccatgcctggctaatttttttgtatttttagtagagacggggtttcaccatgttggccaggttggtcttgaactcccaacctcagctgatccgccctcctcggcctcccaaagtgctgggattacaggcgtgagccaccgcacccggcctgggcaagtgatttctttctgcctaattgtctagtcattaaccggtaactgaaaatcacaaacaatttcaatcttaggactgattgcccagcagtcaattcatgcaagatacttttttttttaaattgaggcttccgtggatggtgaaaatcaaaattggaatgattttcatatggaacaatgaaaagcgcccctttctgagttttctagactgacctctgacctctgtttcggagggcccggctagggctggcctgggactgcagaggattttgttttatttcctgtggactaaattatgataggattttaggcaccagtagagggcgctgagacacaggtgggcgagcagaagacaggctgttcgaggggaagtaaacctaatcgcgttccctttaaactttgtaatgactcaccacggagtcaactgaggaagtaaaacttaataggaatagtctcagtgaacaatgccataaattgacacgcagccaagtgccaagttctgataacaaatcagtaagaaatgcaagttaaaggaatgccattgttcccttagggggaaaaaaacctcttctttgttaaagccagtgatgaccagcagagggtaaagccagttcagaaggtcaaccggcagttttagaaattaatatggtctcacgcatgaatattcttacagtaattctacttgggtgattcaactctgacaaaaatagcagagatgttttctattatttatttaatttacttacctttttgagacaaagtctcgctctgtcgcccaggctggagtgtagtggcgaaatctgggctcaccgcaacgtctgcctcccgggttccagcgattctcctgcctcagcctcccgagtagctgggattataggcacctgccaccgcgcccagctgatttttgtatttttagtagagacgcggtttcaccatgttggccaggctggtctcgaaccgctgacctcaggtgatccacctgcctctgcctcctaaagtgctgggattacaggcaaaagccaccgtgtccagccacaaactgtcttatcaatggcaactgtctcctgatctgttggcctcacaataactgaataataaagcttacgttttgccaggcgcagtggctcacgcctgtaatcccagcactctgggaggccgaggcaggagtatcacctgacgtcaggagttcgagaccagtctggccaacatagtgaaaccccggctctactaaaaatacaaaaattcgccgggtgtggtggcaggcgcctgtaatcccagctatacaggaggccaaggcaggagaatcgcttgaacccgggaggtagaggttgcagtgagcaaagattgcgccactgtactccagcctgggtgacagagctagaccctgtctcaaaaaacaaacaaacatacaaccccaccccccaaaagaccctacatcttaaaacaagaggcaaaattgccctccgttgagaaccactgttctagacttaatctgttagagtcatttatttattttatgcacagaataactttgcaaagaggaatgactttttatttgttccagattctaaaataatctatgcagtcttccgtgcaggttgagatacttaaaactctatcggcaaaggccgggtgtggtggctcatacctgtaatcccagcactttgggaggctgagatgggcggatcacgaggtcaggagatcgagaccatcctggctaacacagtgaaacccggtctccactaaaaatacaaaaaattagcctaggaggcagagcttgcagtgagcttgcagatcatgccactgcactccagcctgggtgacagagtgagattccatctcaaaacaaaacaaaacaaaacaaaaactatcggcaaagtcacagccatggctaattatcatacgtttgttcagcaaattcaccttctttttgcaaacataatttacaccgtttaatcgggaattttacacaaaaaaaaagattctagaaaacatagctgtccataactgtcatggtttccaggttgcaagttcataatcatttgaattattcaaatgagtctctaaatgctacaaaaataatgtcttctacaatgacaagttatggaataaatatatagttgatcctaatttcaggacacttggtatgtaaatatttgctcacgtttttctttgatacgtacacaaagactaatgagtaaacctgtgctcacttatgtcatagctgcttgaaggtttttgttttgttttgttttgttttttttgagaccgagtcttgctgtgtcacccaggctggagtgcagtggcatgatctcgggtcactgcaagctccgcctcctgggttcacaccattctcttgcctcagcctcccgagtagctgggactacaggtgcccgccaccacgcctggcttttgtgtgtgtgtgtgtgtgtgtgtgtgtgtgtgtgtgtgtgtgtgtgttaaaagagacggggtttcaccatgttactcaggatggtctcgatctcctgacctcgtgatctgcccaccttggcctcccaaagtgctgggattacaggtgtgagccaccgtgcccagccgaagttttgttttttgtgtttttttttaatttaagcaaacatatggtttttgttttttatttatttgtttttgagacagggtcttgctctgttgtccaggctggagggcagtggcaagatcacagttcactgcagcctcaaccttccaggttcaagcaatcctcccacttcaaccccccagctggctggaattacaggtgcacaccactatgcccaactaatctttgtatctttttgtagagacggggtcttactatgttgcccaggctgaaatatatgtattttaaggaaaggatgaagtaaatagtattttagtatataaataagagttgagtatcctttatccaaaatgcttggggccagaagcgtttcggatttctgatttttcagattttggaataattgcatataaccacaacaaccaacatttactgagcaccacgtactgtgtgtcaggcaatgatctgagccctttacatgcattaagttacgtaatcactcaacaacccacgaggtgtgtattgtcatcagtttcggtccacaaaggggaagcagagcggagaggaaacctgcgcaggagtgcgcccaataccttttgctgtgtaacaagccttcccctcctgtgaaagggccctatgtgcaaagcagcccccaaatacacatggagttaagaaactgaagaatgaggcaaatccaggttatcaatataaagtttcattttcttcttctttatttgagatggagtcttgccctgacgcctgggctggagtgcaatggtgcgatctcggctcactgcaacctccacctcccgggttcaagagattcttctgcctcagactcctgagtagctgggattacaggcgcccaccaccacgcccagctaatttttgtatttttagtagagatggggtttcgccatgttggccaggctggtctcgaactcctgacctcaggtgatccgccccgcctcggcctcccaaagtgctgggattataggcatgagccacggtgcccagcccctccctcctttccttccttccttccttcctaccttccttccctccctccctcccttctttctctctttcttctttttgtggagaaggagtcctgctcttttgcccaggctggagtgcaatggcgcgatcttggctcactgcaacctccacctgccaggtttggcgattctcctgcctcagcctcccgagtagctgggaccacaggcacccaccatcacggcacggccaactaatttttgtatttttagtagagatggggtttcaccatatcggtcaggctgggtctggaaatcctgaccttgtgatccgcccgcctcggcctcccaaagtgctgggattgcaggcgtgagccactgcgcccgcctagttcctgttctgaagtttttaataaactttcactaatgctctaaagcttgccttggtctctcctgccttattcccccagtggaattctttcttctgaagaggcaaaaatggaagttgctgcagactcatacgcattctccgctgctaacatactttggtgctctgtgactcagatactttccctactgacattcaagtacaataaataaaataaaataaaataaaagaatggtaggtctcatccgaaggctctaggagaaaatcagattaaaaaaagaaagaggccgggcgcggtggctcacgcctgtaatcctgtaatcactttgggaggccgaggcgggcagatcacgaggtcaggagatcgagaccatcctggctaacacagtgaaaccccgtctctactaaaaatacaaaaaaattagccgggcgcggtggcgggcacgtgtagtcccagctaccgggaggctgaggcaggagaatggcgtgaacccgggaggcggagcttgcagtgaaccgagattgcaccactgcactccagcctgggtgacagagcgagactccgtctcaaaaaataataataataaataaataaatagaaaaaagaaaaaataggccgggtgtggtggctcacacctataaccccagcactttgggaggccaaggcagtcagatcacttgaggccaggcgttcaagaccagcctggcaaacatggtaagaccctctgctaaaaatttagccagacatggtggcattcacctgtaatcccagctacttgggaggctgaggccccaaatcgcaggaggtggaggttgcagtgagccgagatcgtgccactgcacttcagcttgggcaacagagccagaccctacctaaaaaaaaaaaaaagttgatattctatgtataatatactatattcttacaataaaggaagctagagaaaagaaaatgttatcaagaaaatcagtgtgcggccgggcacagtggctcacgcctgtaatctcagaactttgggaggccgaggtgggtggatcacgaggtcaggagttcgagaccagcccttatcaacatggtaaaaccccatttctaataaaaatacaaaaattagctgggcctggtggcacgcgcctgtaatcccagctactcaggaggctgaggcaggagaatcgcttgaacctgggaggtggagtttgcagtgagctgagattgcgccactgcactccagcctgggccacagagtgacactccatctcaaaaaaaaaaaaaaaaaaaagaaagaaaatcataagaaggagaaagtagtatattcactgttcattaagtataagtggatcatcataaaggtgttcatcttcatcatcttcaggttgagtaggctgaggaggaagaggaagaggaaggctgtctccgggtggcagaggaggaagaaaatccctggataagtggacccacgcagttcggacccgtgttgttcaaggatcaactgtatacacgcttatatttctcaaaaacaccctatgagttcagagcttgccagatgtagaggacctcacagttgacaacctgagtgacagctgtcaactcatgtgtcctatgtctccccggtatttatggagagcccagctgggctccataacccagtccttggggatctgtttcccaaatgcctctctccaaacgttgccggctgccagatctcatgttttactcctcttcccctcgttcactctcctccagcacagcgttcattttactctttttagaacaggcaaaacacactcccacctccaggcatccggatctgctattccctccaccagagatgctctccttggaggcatgcgggccccacatcaagcactgtctctggagaggctttctctcgtcacctctcctagaattgcattggttactcctgctctcatgcccagctttttttctttatcacacacgtcactgtctgacatagtgtgacatgtctgtgtgttcctgtgggtaattattggtcttcccttaaagtgcaggaatgccatgaggacagggactttttttgtttttgttttaagacagggtctgtctctatcacccaggctggagggcagtgatgtgatcactgctcactgcagccttaacttccctgggttcaagcaattctcccatctcaacctcccgagtagctgggaccacaggcacatgccatcatgcccggctaatgtttgtatcttttttttgtagagacagggtcttgtcatgttggccaggctggtttcgaactcctggcttcaggtgaaccactgcctcggcctcccaaagtgctgggattacaggcatgagtcaccatgtctggctaaggggactttgttctttttttttttttttccggagacagtctcactctgtcacccaggctggagcgtgcagtgctgtgatctcggctcactgcaaccctctgcctcccgggttcaagcgattctcccgcttcagcctcccgagtagctgggactacaggcgtgcaccaccacactcagctcagtttttgtattgttagtagagacgggggttttgccatgttgcccgggctggtcttgaacacctgggctcaagtgatcctcccacctcggcctcccaaaatgctgggattacaggtatgagccaccacgcccggcctagaggactttattttcttcatggctgtatctgcagtgcccgtctgtaacagggcacaatgcactctaggatacttgccgagtgagggaatttcccattagctagtgtagcttcatttctcctgctgcagcccatgcaagaccaccagcatctttcccaaggaccctcgtcttctgtaccctgttcacttgacatcctcatcaagttgatatctttccgccacccagcaagattcttttatttatttatttattatttattatttttttttgaggcggagtctcgctctgtcgcccaggctggagtgcagtggtgcgatctcggctcactgcaagctccgcctcccgggttcacgccattctcctgcctcagcctcccgagtagctgggactacaggcgcccaccaccacgcccagctaatttttttgtatctttagtggagacggggtttcaccatgttagccaggatggtctcgatctcctgacctcatgatccgcccacctcggcctcccaaagtgctggccatcgcgcccggcctaagattcttttaaaaacagaaaccagattgtgtcatttccaatcctaacaacccctaattgcttccttttccactttgaacaaaagccagcttctttacggtgtcctaaaacgccttccatgatctggatcctgttagccttggctgctttccttcctacctccaggttcctcagctctccctgtctgatccaccccattagccgctgcgctgtttttcatacaccagaaaggatgcctttactcagggctcttacgctaacccttccctgtgttgtaacatccaggcttccttaggatctccaggtagcccctcctcctcattctgtagttctcagctgagacattacaaccgcagcttcctcaaaaaattaaaaatagaaacgtcatgtgatccagcaatcccactgctgggtacgtttccaaaggaaatgaaatcagtatgtggaagagacgcctgcactcccgtgtttatgggagtactgttcccagtcgccaagatgtggaatccacctaggtgtccaccaatggatgaacgcaccaagaaaatggggtgtgtacgcacaatggaatactaggcagccttaaaaaagaaggaaatcctggcagggcgtggtggctcatgcctgtaatcccagcactttgggaggccgagatgggcggatcatgatgtcaggaattcgagaccagcctggccaacatagtgaaaccctgtctctactaaaaatacaaaagttagccaggcatggtggcgcacgcctgcagtcccagctactcaggaggctgaggcaggagaatcgcttgaacccgggaggcggaggttgtggtgagctgagatcacaccactaccctccagcctgggtgacagagctaggctccatcttaaaaaaaaaaaaaaaaaaagaagaaggatatcctgtcatttggaacagcatggatgaacctgaggacatacgttaaataaagtcagccaagcacagaaagacatatactgcatgatggcactcatatgtggaatctgaaaatgtggcactcatagaagtaaagagtagaatgggggttcccaggggctggagggagtccgggggtggaggaggaagagagggaatgggaagttcttttttgagacggagtttcgctcttgttgcccaggctggagtgcaatggcatgatctcagatcaccgcaacctccgtctcccgggttcaagccattctcctgcctcagcctcccaagtagctgggattacaggcacgcaccaccatgcctggctaatttttgtatttttagtagtgattcaccatgttggccaggctggtctcgaactcccaacctcaggtgatcctcctgccttggcctcccaaagtgctgggattacacatgttagccactgtgccaatgggaagttcttagtcagagaatacaatgtttcaggctaggcacagtggctcacacctgtaatcccagcactttgggaggccgaggtgggtggatcacgaggtcaggagttcaagaccagcctgaccaacatggtgaaaccccatctgtactaaaaaaaataaaaataaaaaaattagctgggcgtggtgctgcgagcctgtaatcccagctactcgggaggctgaggcaggagaatcacttgaacctgggagacagaggttgcagtgagccgagatcgtgccattgcactccagcctgggcaatagagtgggactctgtctcaaaaaaaaaaaaaaaaaaaaaaaaagaaccatattcttgaaaaccactgacaatagattttaagtgctcacaccataaagaaataagtatgtgaggcaatgcacgtgttcaacagcttgatttagccactccacaatgtatacatatagcaatacattatgttgtacaccataaatacatacacttttctttttcttttttttttttttgagacagagtcttgctctgtcgacaggctggagtgcagtggcgccatctcggctcactgcatcctccacctcccgggttcaagcggttctcctgtctcagcctgccaagtagctgggattacaggtgtgtgccaccacacctggctaattttttgtattttagtagagacgggtttcaccgtgttggcagggtggtcttgatctcttgacctcgtgatctacctgcctcagcctcccaaagtgctaggattacaggcatgagccaccgagcccggccaacacatacacttttcatttgtctatttaaaaaaatcactactggccaggcgcggtggctcttgcctgtaatcccagcactgtgggaggctgaggcgggcggatcacttgatgtcaggagtttgagatcagcctggccaacatggtgaaaccccgtctctactaaaaatataaaaattaggtgggcatggtgggcgcctgtagtcccagctactcgggaggctgaggcaggagaatcgcttgaacccaggaagcggaggctggcagtgagccaagatcgcgccactgcactccattctgggcaacagagcaagaatctgtctcaaaaaaaaaaaaaggaaagaaaaaagaaatccttgccaatcctgatatcccagagatgtttcccaatgccttgctcttgaatatttatagttttatctttcacacttagacatgtgaaccatctagaaatgtatttggggtacggtgtaaggtcggggtcctggaccgaatacagctccacaaaaatgtctgttctcgactgcaaaaaagcaatgtgactttgtgcacagatcaagtgcatctgtttctgaaatctgtagtgttctgtgtcatcagcctgcatttccatggttgcgacaataccacattatttgcctcatttcctaccgcagttcctcaatcactctgaattcagcggcactagcctcattgctctcggatgagcacacctattgtgtaccactcagggcgcctgtgtctggactggcagcctttcttagatgctttgggtggtggttctgtcttatccttcagccagcagctcagagtcctcccctcaaaaggcctttccctgaccactccatctaaagtagctcaccccagcctcctatatctttttttttttaataatgcaacagagaaggtgatataggtgcattgacaggccttcttttattagcttgagccattattattattattattatctgagatggagtcttgctctgtcacccaggctggagtgcagtggcacgatctcggctcactgcaacctctgcctcccagggtcaagcaattctcctgcctcagcctcctgagtagctgggattacaggcgtacaccaccatgcccgactaatttttgtagttttagtagagatggggcttcaccatgttggtcagactggtctcgaactcctgacctcgtgatctgcctgcctcagcctcccaaagtgatgggattacaggcgtgagccaccgtgcccagccttcttcttcttcttcttcttcttcttatcatcatcattttgagatggagtctctacctgtcacccaggctggattgcagtggggcgatcttggctcactgcaacctccgcctcccaggttcaagcaattcccctgcctcagcctcctgagtagctgggacttgtattttttagtagagatggggtttccccatgttgcccaggctggtctcaactcctgacctcaggtgatccacctgcctcggcctcccacagtgctgggatgacaggcatgagccaccacgcccagccaccagtcccctatatcttatgttctggtacattttgctatacaaaaacaacttatgtgtgtgtttgctgactcattgtctctctcttgcatgtgtgaacagagcagcagcaataatgtttgcatgtcttgttcactggccatgtcccctgggcatagcatacggtagggaattcactttggatgaagaaaaatgatcctcttgcatccattcaggatgaatgcattctaccctcagagtcctctagggggcacccgcacatgaatgcgcccctgcagggcacagttcttgagttgtttttgtttaactggcctgcacctgttattttgtttgtgtgtgtgtttgggtttcttcttcttcttcttttttttttttttgagacggagttttgctcttgttgcccaggctggggtgcaatggcgcgatctcagctcacagcaacctccgcctcctgggttcaagtgattctcctgcctcagcctcctgagttgctgggattacaggcatgtgccaccacacccagctaattctgtatttttagtagagatggagtttctccatgttggtcaggctggtctcgaactcccgacctcaggtgatccgcccacctcggcctcccaaagtgctgggattacaggcatgagccactgcaaccagtctttttttttttttttttttttttttttttttaagatggggtcttgctcagtttgtccaggctggagtgtagcagtgcagtcacagctcactgcagcctcgcactcctgggctcaagtgagcctcctgcctcagcctcctgagtagctggaactataggcacaaccaccttgcctggctaattaaaaaaaaaattttttttttaaagagtcagggtcttgctatattggccaagctgatctcaaattcctgacctcaagtgattctcccacctcagcctcccaaagtgttgggattccaggcatgagccaccatgcaccaggtctggcctacagcttttaactacacatttagaaagagaaaccacaagtggtaaaagcctgggttctgccctagattacccgaaatgagctatttttatagaagcctcctgtgtgcaggggctcatgctaggccccaagggcaggcagaggttgttttttgttttttgttttttaatttgtttctttttgagacagggtctcactctgtcgcccaggctggatgctgtggtgcaatctcagacctgcaacctctgtctcccaggttcaaggaattctcctgccttggcctccggagtagctaggacaacaggcacgcaccaccacgcccagctaatttttgtatttttagtagagacggggtttcaccatgttggccaggatggttttgaactcctgacctcagatgatctgcccgcctcagcctcccaaagtgttgggattacaggcgtgagccaccgcgcctggcctaaggcagaggttgttgactggtctcagttgctgcttggaagggccccagtctcctgcagggagggagggaggatcccactatggctcccagaactttgcttcccagcaagaggcactaaatcaatcccatgcttgaggatggtgggccctgagagaaatgaatcttggcctccaagtgttcagactgtgtgggggacacctgctatttacatttgtgaaatggggctggtgaccttggctcagcgatgggctccatctcatctcctcctggaagcttgatggaggaaaagcatctacagccatttgttatcactgggctccttgcctgaaagattataaatacttcgttaaaatacatacatccatagtgatgtgttttgacttggtaatagatttcagggtagacgcaagcctcctcagccacccctgttttccagttgcccagagttcctccctttctgtttttactgatttcttctgtatctttctggaaatatccattgcatatatatacacacacagatatatatatatatgcatgtataaatgtgtgtgtatatatatatgtgtgtgtgtgccgatataagacattgttttaagtattttacgtgcattgagtcatgtaatataaatatacttttatattgctaatacattaatatgtttaaaataagaaaattatacaggccagatgcagtagttcacacctataataccagagctttgagaggtcgaggcaggaggatcacttgaggccaggagttcgagaccagcttgaacaacatagggagacccctgtgtctacaaaatataaaataaaatataaaaaataaaacccggctaggcacagtggcttacacctgtaatcccagcactttgggaggctgaggtgggcggatcacaaggtcaggagtccaagaccagcctggccaacatagtgaaaccctgtctctactaaaaatacaaaaaaaaaaaaattagccgggcatggtggtaggcacctgtgatcccagctactcaggaggctgaggcaaagagaatcgcttgaacctgggaggtggcggttgcagtgagccgagatcacgccactgcactccagcctgggtgacagtgtgagactccatctcaaaaaatgaaaaataaaaataaataaattaagcccgcctggcgtggtggctcatgcctataatcctagcactttaggaggccgaggcaggcagatcacgagttcaggagttcgagaccagcctggccaacgtagtgaaaccctgtctctactaaaaatacaaaaaattagctgggcgtggcagcatgcgcctgtactccaagcttcttgggaggctgaggcaggagaattgcttgaacctgggaggtggaggttgctgtgagagccgagattgtgccactgcactccagtctgggtgacagggtgagactctgtctctaataaataaataaataagtaaaacaaaccctagccagggagacagctgtggtcccagctactcaggaggctgaggtaggaggatctctcagacttaagaggtcaaggctgcagtgagtcgtgatcataccactgcactctagcctggcaacagggtgagaccctgtaataaaatacataaacagtgatgtgttttgacttggtaatatatttccgggtagactgtaagcttctcatccatcccagttttcccattttccagcgttcctccccttctgttcttattgatgtcttctgtatctttttggaaatatccatggcatatatatatatatatatatatatatatacacacacacacacacacacacacacacacatatacacacatatacatgtgtgaatatacatgtgtgaatatatatgtactgatacaaggcattattctaagaattttacttttatttttatttttatttttttgagacagagtctcactctgttgcccaggctggactgcagtggctgaggctcactgcaacttccctctcccaggttcaggcaattcttgtgcctcagcctcctgagtagttgggattacaggcaccagccaccacacccagctaaattttgtatttttagtagagaagggatttcactatgttggccaggctggtcttgaactcctggcctcaggtgatccatctgcctcagcctcccaaagtgctgggattacaggcatgagccaccgcacccagcctattctaagaattttatatgcattgaatcatgtaatatagatataatttttttttttgagactgagtttcattctttgtccaggctgcaatgcaatggcatgatctcagctcactgcaacctctgcctcccaggttcaagcaattctcctgcctcagcttcccaagtagctgggattacaggcgcctccaccacgcccggctaatttattgtatttttggtagagatggggtttcaccatgttggcaaggctggtctcaaactgctgatctcaggtgatcccctgccttggcctcccaaagtgttgagattacaggcatgagccaccatgcccagcctgatataattttataaagctaatacattaatatgtctattttttattttttatttttttgagatggagttttgctcttgttgcccaggctggagtgcaatggtgcgatctcggctcatcacaacctctgcctcccaggttcaagcgattctcctgcctcagcctcctgagtagctagaattacaggcatgcaccaccaccccagctaattttgtatttttagtagagatggggtttctccatgttggtcaggccggtctcgaactcccgacctcaggtgatatgctggccttggcctcccaaagggctgggattacaggcgtgagccactgcgcccagccaatatgtttaaaatagaaaaattatacaggtcgggtgccaaatttttttgtagagacagggtctcactatgttgcccaggctggtcttgaactattggcttcaagcagtcctcctgctttggcttcccaaagtgctgggattacaggcatgagctgccctgtccggcaggctccttttaacaatcagctctcatgggaacaaatagagcaagaattcactcattaccctgagaagagcgccaagctcttcatgcaggatgggcctccacgacgcaaacacctcccacaaggccacaggcctccaacattcagaataaattttcttttttcttgagacagagtctcactctcttgcccaggctggagtgcagtggcgcaatctcggctcactgcaacctccacctcccaggctcaagcgattctcctgcctcagcctcctgagatcacaggcgctcgccaccatgcccggctaatttttgtatttttagtagagaggggatttcaccatggtggtcagtctggtctcaaactcctgaccgcaggtgatccacccaccctggcctcccaaagtgctgagattacaggtgtgagccaccgtgcccagcccaggatcaattttcaacatgagatttggaggggacaaataggtaaaccatataaatatccttatttttatgttttctcacctgtaagattgcatcctcatgcatcattgttcacttaggacttcctcctagaaagcttttcatttaggtaaacagagcttcctcatccttttaagaagatacagacatgtttgcattattgaatctgccatcgttcatctcaccagtcccctataagatggagtcttgatctatttccagtcttagaagtacattcagcaggggagttttacaaatcaaatagatttccttcgtcgttcccccaaaaatgcagcctacgtcttcaaaaccgaagacttcagtctattttgcttaaggatgacaaaagtcaccatctgttaatccaatctgcatcaggagaaaaacgaaaatcatctcatgcgcatgaaacctcctcttgggctatgtgaaggggaattcctgagggtctcttgccatgcagcagggagagcctctggctgtggtggctcttgtttggatccaagaagcagaggaggaatgtgttgaaggactttgagtaaaagcaaaagagccgggcgcggtggctcacgcctataatcccagcactttgggaggccgaggcgggcggatcacgaggtcaggagatcgagaccatcctggctaacatggtgaaaccccgtctctactaaaaatacaaaaaattagccaggcgtggtggcaggtgcctgtagtcccagctatttgggaggctgaggcaggagaatggcctgaacccgggaggcagagcttgcagtgagcagagatagagccactgcactccagcctgggtgacagcgagactccctctcaaaaaaaaaaaaaaaagcagaagagccacgacctggctcatgcctataatcccagcactcttgcgaggctgagacaggtggatcatctcaggtcaggagtttgagaccagcctggccaacatggtaaaaccccatctctactaaaaatacaaaaaaaaaattagccgggcatggtggtgcatgcctgtaatcccagctactcgggaggctgaggaaggagaatttcttgaacccaggaggcagaggttgcagtaaactgagatcgtgccactacactccagcctgggtgacagagcaagactctgtctaaaaaaaaagcaaaggatacatggaaaggctacggaatccggctcaggaatgtggcaggaggccaagaatagacagcagcaagaatgttcctaatatcagatgcagccacaccccggtggggaagccaccattaccaccaccaccactgggcactgccctcctgacattgactagtgacacctttgcccttgccactgtactttaattttctttctttctttttttgagacagagtctcaccctgttgcccaggcttcagtgcagtggtgcgatcatagctcactgcagaattgaacccacgggctaaagagatcctcctatctcagcctcccaagtagctgggaccacagttgtacatgaccacacccagctagtcagtgtttttctaaaaaaaaaattcatagagccagccgaggtggctcatgcctgtaatcccagcactttgggaggccgaggcaggcggatcacgaggtcaggagtttgagaccagcctggccaaaccctgtctctactaaaaatacaaaaaaattagctgggcatggtggccagagcctgtaatcccagctactcaggaggctgagacaggagaatcgtttgaactcgggaggcataggttgcagtgagctgagatcacaccactatactccagcctgggtgacagagcaagactccatctcaaaaaaaaaaaaaaaacccaaaaccaaaaaacatagatactaaattttgtcaaatattcttttagcatatataagatgatcatactgattttttttttactttgttaatatgataaagctcattaatggtttttgaatattagccattctgggctgggcacagtggcttacgggtggttttgggaaactgaggcaggaaaattgcttgagcccgggagttcaagaccagcctgggcaacatggcaaaaccctgtctttactaaaaacaccatgctgggcatagtggtacacacctgtattcccagctactcagaaggctgtggagggaggatcgcttgaggccgggaggttgaggctgtagtgagctgtgatcacgccactgtgatcacgcctctgcactccagcctaggagacccagagagactctgtctcaaaaaaaaaaagaaaaagaaaaagaaaaagaaaaaaaagccattttggcatttctggaataaaccccagttggtcacaatgtatttttttttactctaccgctggagtctgaatgctaatacaggctgacacactccaaaacccagagctctattctgagcctaaggagtccacacgaaatgaaggctgtgctaccgtgccatagccacaaagagcacttgaaacctggctagtgagactgagaaaccgaattttaaattttattattattattattatttattgagacggagtttcgctctggttgcccaggctggagtgcaatggcgcgatcttggctcactgcaacctctgcctcccgggttcaagcgattctcctgccttagcctcctgagtagctgggattacaggcaggcatcaccacgcccaggtaattttgtatttttagtagagccgcggtttctccatgttggtcaggctggtctcacactcccgacctcaggtgatccgcccgcctcggcctctcaatgtgctgggattacaggcgtaaggcccccgcccggtctattattattattattattattattattattattattgagacagagtctcgctctgtcgcctaggctggagtgcagtggcgtgatctctgctcactgcaatctctgcctcctgggttcaagtgattctcccacctcagcctcctgagtagctgggactacaggcatgagcctccacatctggttaatttttgtatttttattagagatggggtttcattatgttggccaggctggtctcgaactcctgacctcaagagatctgcccgcctcagcctcccaaagtgctgggattacaggcatgagccaccgcgcccagccaatagagtttatttttaaaagcatttttaggttcacataaaaattgagcagaaggtacagagatttccctgtccccacacatgcacagcctccccaactaccaccatccccagctagtggtagatttgttacagtggatgaacctccgctgatttgacatgtcatcttcacccagggtccacggtttacactggggttcacttggtgtcatagaatctataggttcatacaaatgtataataatcagtatttaccactatggtgtcataatacagtttcattctcctaaaatatctcttactctgcctattcattgcaaccccaactctcctgacttttttcttattttttttttaaactttttaaaaatgttgctactacttctttgggagactgaggcaggtggatcgcttgaactcaggagttcaagacccgtcttcgtaactgagtgagaaccagtctctaccaaaaaaaaaaaaaaaaaaaaaattagcctggcatggtggcgagcacctgtagtcccagctactctggaggctgaggcaggaggattgcttgagctctggacgtcgaggctgcagtgagccgagatcacgccactgcactactccagcctgggcggcagagcgagaccctgtttcaaaaaaaaaaaaaaaaaggaagcagaaatgcattcacaggctttgctgctaggtggttattattttttgtttgtttgtttgttttttgagagagagtctcagtcactctgtcgcccaggctggaatgcagtggtgtgatctcaggtcactgcaaactctgactcccaggttcaagtaattcttctgcctcatcctcctgagtagctgggattacaggcatgcaccaccatacctggctaatttttgtatttttagtagagacagggtttcaccatgttggccaggctggtcttgaactcctggcctcaagtgatccgcctgcctcaacctcgcaaagtactgggataacaggcgtgaaccactgcacctggccaatcactactttgtgtgtccagaaaattttcttcctcctaaaaagaaatcttctacacttgtatcatccccatcccttgagtgtgggaggaacgtgttactttcttctaaccaatacggcatggcaaaggtggtgcttatatgttgtagaagatttcttgctagctgacacaccctagagtctctcatcactgactttgaaggagcatgcactgatgagttgatgagggttttttgtttgtttttttgtttttttttgagatggagtctcgctctgtctcccagcctggagtgcagtggtgcgatcttggctcactgcaagctccgtctcccaggttcacgccattcttctgcctcagcctcccaagtagctgggactacaggtgcccaccaccacgcccggctaattttttgtatttttagtagagacggggtttcaccgtgttagtcaggatggtctcgatctcctgacctcgtgatgtgcctgtctcagcctcccaaagtactgggattacaggcgtgagccactgtgcccggctgagttcttttttttttttttttttgagacagggttttactctgtcatccaggggctggagtgcagtggcgtgatctcggctcactccaacctctgcttcccaggctcaagtgattctccagcctcagtctccccagtagctgggactgcaggtaccaccaatacctggctaatttttgtatttttatagagatgtggttttgctatgttgcccaggctggtctcctgagctcaaaacaatctgccctccttagccttccaaagtgctggggttacaggtgtgagccaccgtgcccagcccctgatgagttctaaagtcacaaggaaacaaattctgcagcaagctgagtgaatttagaagcacgtcctttcccagcggagccttcagatcaaaactcagtgccgggccgggcgtggtggctcacgcctgtaatcccagcactttgggaagccaaggtgggcagatcacttgaggtcaggagttcaagaccagcctggccaatgtggtgaaaccctgtctctactaaacatatgaaaattagccggggtgatggcatgtacctgtaatcccagctactcaggagactgaggcaggagaatcgcttgaacctgtgaggcagaggttgcagcgagccgaaatcgtgctactgcactccaacctgggcgacaaggtgagactccatctcaaaaacaaacaaaccaacaaacaaaaaacacaaaaacaaacaaacaaacaaacaaacccaaaactcagtcctggccaataccttgattacagcctcacagagaacctggctaaactgtgctaagctccatagaaactgtgagataataaatgcacacatatatatgcatatatatgatatgtgtgtgtgtgtattttaaatccaacgaaatattctttgagtaggaacattgactatcaaaaagagaagaattgtaacagcaatagtaaggttatgagaagaatgtctttagagatgaaaaagaggaaaagaattgacggctgggcacggtggctcacgcctgtaatcccagcactttgggaggccgaggcaggtggatcacctgaggtcaggagtttgagaccagcctggctaacagagtgaaaccccatctctactaaaaatacaaaattagccggacgtggtggcccatgcctgtagtcccagctattcgggaggctgaggcaggagaattgcttgaacccaggaggcagaggttgcagtgagcagagatcgcaccactgcaccccagcctgggtgacagagtgagactccatcttaaaacataaataaataaataaaaagaaaagaattgacctgagatgaaaaaaacaacttatttgtttttagaggacagtcctagaaatgtagccaggtggctggacgcggtggctcatgcctgtaatcccagcactttgggaggccgaggcaggtgggtcacctgaggtggggagtttgagaccagcctgaccaacatggtgaaaaccccgcctctactaaaaatacaaaaaaatttagctgcgtgtggtggtgggtgcctgtaatcccagctactggggagactgaggcaggagaatcgcttgaacctgggaggcagaagttgcaatgagccaagaccacctctttgcactccagcctggatgacaagagcgagactccgtctcaaaaaaaagaaaagaaaaaacacacacattggtgtcagacgtgttgcgagtggaaaccacttcgtaatctttatcccaagtgaactctccccctaaaacctctattacagggaatgctatgatgccatgtggtagatcagatgaccactctgaggatctggatcagcctccttccctggcatcctcagggcttgctccataggttcaggagcaaagtggccgaggtggactacaccacctacgtcactgatgaatgcccacctagctggcagtagcaagtgctgatcccccagtgtggtacagtttcctaggaagaccaaaaagccaaatacctgggcccgtgaggattacactggagccctttcatcctgggctgggcagggagtttttcctccctcgagtaaacaactctgggcttgttatttgcttttcttgccctttgcacttctgccaacagcagcatctgtgtatgcactgaatggccctattcaccctcatgttaacccgcacagtattgcttctgatcaaggagctccatatattaggaagtcagtggggggcagtccatgtaccccattaccccaaagcagccagcctcatggaacagcacggcctgtttgagactgggttacagggccagtttggagtcatcatctttggggtcggggtgctgttacaggatgggtaaccactctgaaccaggggtacatgccagatgatcccagattacaaagacctgtgaactcaagagtgccatttctttcttttatttttctctctcttttttttttgagacggagttttgctcttgttacccaggctgaagtgcaatggcatgatctcagctcactgcaacctctgcctcctgggttcaagcgattctcctgcctcagcctcccaagtagctgggattacaggcacatgccaccccgcccggctaattttttgtatttttagtagagacggggtttcaccatgttggccaggctgatctcgaactcctgacctcaggtgatccacccacctcggcctccctcccaaagtgctggaattacagacatgagttgctgcatcggccaagagtgccatttcttaggaccacacccgatgactcactcttcaaatttttatttgttttgttgttattttttgttttgagacagagtttcgctcagtcacccaggctggagtgcagtggcaatcttggctcactgcaacctccacctcccgggttcaagccattctcctgcctcagcctctggagtagctgggattacaggcggcgccacaacgcctgattaatttttttgtatttttaatagagacggggtttcatcatgttggccacgctggtcttgaattcccgacctcaggtgatctgcctgccttggcctcccaaagtgctaggattacagaggtgagccaccgtgaccggccttcactcttcaaatgtttgcttcctgttcctgctaccctgaaccctgctgttgaggggttctagtgtctacaagggaaccgctgccaccacgaggaataacacagtaagttgtgtaagtggagaccacctctgggccgtttggggtaccttgagtgtgtcactatggggttaggcagtgactaatttaggcaggaaggggaaagatttgctgctacacttggggccaaggaggcctgtgaatagaacctagaggcgtcccaggggagtctccaactaacaccatgtcccgactccctatctgtccacagccctccctccttggacaaggacaaggcctgatctgggtgcactgagacctccctcccctatgcagggcccagagtgacaaagagggtctgtgtccccttccctttgcagaagcacatcaagcccgcacacaggctctaccttcctctacccaaccccctctccactcctgcagacccccgccttcctgcaggtccccctccggcccctccctgctccgtagggcacgtagacccggatccccagctcccggaccccttccgactgctcccttcgccactcgcgcggcttccactcctggactcggcctccacccctgggcttggcctcaaagcctcctcagttgtcggccctggaaggtgcccagcggcggcagcgccagacgcgccccgttagctcagcgtcgctgagcatccgcagccgccaccaggccccgcccagcggccgcagccagccaggccgcgcccgggacgactgcagagcgcggtgagtgaacgcggccagagggagggactcaggcgtcccaggtccccgccctgcccctccccgggggcccgacatcccgaccctcagctccctctttttcttttggctccggcagtccgttttagggccgcagagccgccttttaaaaacacaccctgcatcccttccctgccctggggcttcgggcccaccagccccttggatcccttcccctcttgcaggatccgtgaatccagagccccaagccccagccccagccccatcctcattaaaattctgagtccctccctccatccaggagtcaggaatgtaggccaaaaatatcgctgccttccagacccaggcggctaggcttgcaacacctgctcggaaaacccgagtctgagctttaatggttctattatgatgatcatgatgatttatttttaatagagcagagtctccttatgttgcccaggctggtctcgaactcctgggctcaagggatcctccctcctcagcctcccgaaatgctgggattacaggcgtgagccaccgcgcccaggcctgattgttcttttgagccaagaatctgggcctcagcctaggcatcctgtggagcccaggaatccgggcccccaactgctaccgcgctagctcccaggaattttgcccccaacacaccccacccctatccactgtgatatctgagacctgcgtccagcccgagtcccttaccctgcggcgcccggtgccagtgggtactaggggagcattttgccgccccttcaagtccttaaatacaggaatctagcctctgtttcttggggagacccatcagtcagggatcgtagcccagaaccacctaaagcccaggaatactgctctcaattctgctctccctcagggctccaagagacagagatcctagcccccccattgaactgaggggcctggtcccccaatccgctgcgacccaggtgtctaaggtttcatccggcaaggaaggggtgggggcggaacagaccaggaaggagggggtaggaagggagcggaagaaaggagtgaggtgagacgggggcggggacctgagctggggggctctgcactaaacaaaccctaaacatgcggggtttctatggtaacggtcttccctggcctacccgggagactcctctagggctgtgtcgaggagggcagcccccaggagtctccacgccgccagctgttgtgtcttcctgttttgtcaccacggcaaccgtgacctcagccctccaccctgctcactggggtggggcgggagctccacgctacttttactctggggggcgtggtctgctcttggccccgcctcggggcggggctgggatagcccagactcggggaagtccctgtccaccgccctagccggagctgcgccccgccccggccccgcccccgtcccgcccgcgctggctccccagccctccaaccccacccagccctcagacccttccagctgccgctgtcgtctttgcttcagccgcagtcgccactggctgcctgaggtgaggttgtggggaccccagagggcataagcaacagtctagggtctttatggccagagagaggaatgggctgggtctcagaatgtctgggtccctagaaagactggggctgggccaggattcttggggttctgcagaggagagggctgaggacctggactgtggaggtcatacgtctggaagagtggggaaggggacctggactccggggtctgagggaggaggggctgggggtctggactcccgggtccgaggcaggaggggctggggggtctggactcctgggtccgagggaggaggggctgagggcctggactcctgggtctgagggaggaggagctgggcctggactcctgagtctgagggaggaggggctgggtctgcgggagtagagagatggggactcgtaggtgccctagttggaggctggaatctggtacgtggaggtcctttaggaggggaagcgcttagggttaggtgtcctgggtttgggaatgagaatggaaggaattcagaattactgacccctccccatccaggggacagacagaatcggaactttgggctcctgaaaggccgagggaggggggtgttaagatccagccccgtgcttccgaagtgcagaaggagctgggaaaggaggagaagacagggctgcgtcccgcacctctgggtgccgagagccgaagctggggttccggggcccgattctcagcgtgagcgatgggtgtggcgtctggagtggacgagggaggacactgaggggctgggtgtggcccggagagtcgggtgcgctgcgaggaatcccggaggggtgtttcctcaccctccagggtctggctgcgcattcctgagctctgatctcgggcgatggctggaggccctaagggcggggtggacccctcccctcccctcccctcggcgcgcccccctcccctgcgcgcccccctccgcggctagcccaccttccgcgggggacagaatgagtgacgccctcgctcgtcctcctcccctgcttgggacggggcagtagcccgccttctagagcacgggacgctgggccagtcccgatttccttctccttcgagggtcctggaggggcgtgggggcaggcagtgtctggctccgggtggagcctcccaggtgctcccgcaagccccgaatggcgattagggaggccgtgggaggcgtagctgggcctcgggcctgacgccagcaccgcgtgcagtttccggcctggagcctgagcccctcagaggcccgggtccctgcccactccggtcttagagatgctcttgggggggctctcagcccatgtttatagggatccagaaatgcaggcctccaaccctgagagtcggggtccccaccccccggaaatccgggagagggcgggcagccccggaggcgggcgggggtccgggcaccgcctcctggtccctgacacattccagatgcctgggccgactcgaagcccttataaggcgcggagacaccggctctggctgggccgcccgcctccacagccgccgcccagggttctcccgccactgccgcccgcacccccgcccccgcggggttaagatcacacacgcgcccacgccggcccgcggggcgtgcactttcgctgggttccgtccgccgcagcccaaacagttaactgaacggggaggggagggggcggggcttacccggggtcaccgccagggccctgctgggttccacgccacgttcctgtctccgcagggcgttcgatccctagagggaggagcctgtccaaacggacgctaacggcctacctccccctcaggtgctcttacagcctgttccaagtgtggcttaatccgtctccaccaccagatctttctccgtggattcctctgctaagaccgctggtgagtaggcagcgggcctggactccggggtccgagggaggaggggctgggggcctggactccggggtccgagggaggaggggctgggggcctgggctcctcggtccgagggaggaggggctgggggcctgggggcctgggctcctgggtccgagggaggaggggctgggggcctgggctcctgggtccgagggaggaggggctgggggtctggactccggggtccgagggaggaggggctggggtctggactcctgggtccgaggaaggaggggctggggtctggactcctgggtccgaggaaggaggggctgggggcctgggctcctgggtccgagggaggaggggctggggtctggactcctgggtccgagggaggaggggctggggtctggactcctgggtccgagggaggaggggctgggggcctggactccggggtccgagggaggaggggctgggggcctggactccggggtccgagggaggaggggctggggtctggactcctgggtccgagggaggaggggctgggggcctgggctcctgggtctgagggaggaggggctgggggcctgggctcctgggtctgagggaggaggggctggggtctggactcgtgggtctgaaggaggaaggattaggtcctgggctcctagatcctgggagaaggaccaggaagcttgggctccaaggaatagggtcccagacactgaggtatctgaggaagaagcgagtccaggccctggctcctttgtctcagggagctgctgtcctgcgactgccacgaagaggttaaggcctgtgctactgccctgcaaagtgcctgaagctgaaaggaggaagttactttcctgtggctaggagaggccttgggtttagtcctgtggctgcgttgagacagtttacagcctaaggaaagaactgggcacctggtttctaagaggacgggcacttgattcctgggggccattaggacaaggaggtggaagctgtaggttttgcaaggactaaagaagcaaattggttttctggagtctggggcatctgggatccttcaggctaagggtccagggccagaggtctgaccccttataacaggacggtgatggccaggcgcagtggctcatgcctgtaatcccagcactttgggaggccaaggcgggcggatcacttgaggtcaggagtttgagaccagcctggccaacatggcgaaaccccatctctactgaaaatacaaaaattagccgagcatggtggcacacacctgtaatcccagctactcaggaggctgaggcaggagaatcgcttgaatccgggaggcggaggttgccgtgagtcaagatcgcaccattgcactgcagcctgggtgacagagcgactccatgtaaaaaaaacaacaaccaaaaaacaggattgtgaggcctagagagagttcagtggaagggcctggggttcctactggacagttggaaatctggggagctgagtttcccagaagctgggggaccagctggctgggttttggggagagaaggtggaggtagatggactcagtatgcaggagtgtggagggggaggctcaaactagcttttttgggttgcagtactccagtcctaaatctcaggtgggagttagactgagagtgaaggttgctaatctccaaggtggggggtagggagaggaggaggccgctaagagtttaggctccttgtcagaagggaggggagatctcttggttttccacggctgggatctctatgagaagatatcctttatcgggaggtcggagctcttattagatgtgggtccctgagagtggaagcctggggaggttgggccgtttagaggctgcaaatgtctaggtcactgttcgatggaagaaggaagtttgctcacagggtctggggtgcagagctctgaatactgaaagaaaaggaagttgagagatggggttttcagagcctgtggaagacaagcgttttgttctgacacttgggttgtggcaggaggcagaaggaggatgctttattttttatttattttatttatttttattattttattttattttttgagatggagtttcactcatgtcacccgggctggagtgcagtggcgcaatctcggctcactgcaacctccacctctagggttcaagcgattctcctgcctcagcctcccaagtagctgcgattacaagcgcccaccaccacacccagctgatttttgtatttttagtagagacggggtttcaccatgttggtcaggctggtcttgaacttctgacctcaagtgatctgccagcctcggcttccgaaagtgctgggattacaggcatgagccactgcgcccagattattttattttttttgaggcggagtgtggctctgtggctcaggctggagtgcaggggttctatcttggctcactgcaacctctgcctcctgggttcaagtgattctcctgcctcagtctcccgagtagctgggattgcaggtgcatgccaccacgcccagataatttttgtattattagtagagaccgagtgtcgccacgttggccaggctggtctccaactcctgacctcaagtgatccacccaccttggcctccgaagtgctgggattacaagtgtgagccaccacacccggcctatttgtaattaaaaaaaattttttttttttgagtcagggtctcactctgtctcccaggctggagtgcactggtgcatcacagctcactgcagccctgaccccacaggctcaagcaatcctcccacctcagcatcccgagtagctgggaccacacgcacacaccaccacacccagctaattaaaaaatttttttttggtaaatgaggtctccctaaggttgcccaggctggtctccaactcctgggctcaagcaatcctcctgcctcagcctcttggagtgctgggattacaggcatcagccacacctgtgcctggccagaggggtggtgctatagagtacagagtgctaaatggctgagctactgagtcccttggggagggagggaaagagggaagcacggtatctggagtgggaagcaaacagtgtagttgtacagtagttaggtcttgaaagagagaagaatctcttgagaaggaggaaaataggggcctagactcctggattctgatacgagtaggggaggagtgagccttgaaccggaggggacaggctcatccctgtatgcccaggactgtccccatttgaaaacccaaggctgggcccggtggctcacgcctataatcccagcactttgggaggccaaggccagcggatcatgaggtcaggagatcgagaccatcctggctaacacagtgaaaccccgtctctactaaaaatacaaaaaaattagccgggcgtggtggcacatgcctgtaatctcagctactcgggaggctgaggcaggagaatcacttgaacctgagtagcagaggttgtagtgagctgagattgtgccaatgcactccagcctgggccacagagcaagactctgtctcaaaaaaaaaaaaagaaaagaaaaccgaaagccccacatcttgggaactccctaattagagctcatattaatttgtccctggggtaggcaatggctaagggacctggattcttatgtttgtgactgtataaggacactgtctttcccctttttgcagccatgccagtgacggtaacccgcaccaccatcacaaccaccacgacgtcatcttcgggcctggggtcccccatgatcgtggggtcccctcgggccctgacacagcccctgggtctccttcgcctgctgcagctggtgtctacctgcgtggccttctcgctggtggctagcgtgggcgcctggacggggtccatgggcaactggtccatgttcacctggtgcttctgcttctccgtgaccctgatcatcctcatcgtggagctgtgcgggctccaggcccgcttccccctgtcttggcgcaacttccccatcaccttcgcctgctatgcggccctcttctgcctctcggcctccatcatctaccccaccacctatgtccagttcctgtcccacggccgttcgcgggaccacgccatcgccgccaccttcttctcctgcatcgcgtgtgtggcttacgccaccgaagtggcctggacccgggcccggcccggcgagatcactggctatatggccaccgtacccgggctgctgaaggtgctggagaccttcgttgcctgcatcatcttcgcgttcatcagcgaccccaacctgtaccagcaccagccggccctggagtggtgcgtggcggtgtacgccatctgcttcatcctagcggccatcgccatcctgctgaacctgggggagtgcaccaacgtgctacccatccccttccccagcttcctgtcggggctggccttgctgtctgtcctcctctatgccaccgcccttgttctctggcccctctaccagttcgatgagaagtatggcggccagcctcggcgctcgagagatgtaagctgcagccgcagccatgcctactacgtgtgtgcctgggaccgccgactggctgtggccatcctgacggccatcaacctactggcgtatgtggctgacctggtgcactctgcccacctggtttttgtcaaggtctaagactctcccaagaggctcccgttccctctccaacctctttgttcttcttgcccgagttttctttatggagtacttctttcctccgcctttcctctgttttcctcttcctgtctcccctccctcccacctttttctttccttcccaattccttgcactctaaccagttcttggatgcatcttcttccttccctttcctcttgctgtttccttcctgtgttgttttgttgcccacatcctgttttcacccctgagctgtttctctttttcttttcttttttttttttttttttttttaagacggattctcactctgtggcccaggctggagtgcagtggtgcgatctcgactcactgcaacccccgcctcctgggttcaagcgattctcctgccccagcctcccaagtagctgggaggacaggtgtgagctgccgcacccagcctgtttctctttttccactcttcttttttctcatctcttttctgggttgcctgtcggctttcttatctgcctgttttgcaagcaccttctcctgtgtccttgggagccctgagacttctttctctccttgcctccacccacctccaaaggtgctgagctcacatccacaccccttgcagccgtccatgccacagccccccaaggggccccattgccaaagcatgcctgcccaccctcgctgtgccttagtcagtgtgtacgtgtgtgtgtgtgtgtgtgtgtgtgtgtgtgtttggggggtggggggtgggtagctggggattgggccctctttctcccagtggaggaaggtgtgcagtgtacttcccctttaaattaaaaaacatatatatatatatatttggaggtcagtaatttccaatgggcgggaggctttaagcaccgaccctgggtccctaggccccgcctggcactcagccttgccagagattggctccagaatttttgccaggcttacagaacacccactgcctagaggccatcttaaaggaagcaggggctggatgcctttcatcccaactattctctgtggtatcaaaaagaaaaaaaaaaaaaaagaaggagtcggggccgggcgtggtggctcacgcctgtaatcccagcactttgggagaccaagtcaggcaatcatctgaagtcaggagttcaagaccagcctggccaacatggtgaaagcatgtctctattaaaaatacaaaaattagccgggcgtggtggcgggcgcctgtaatcccaggtatttggggggactgagacaggagaatcccttcaacccgggaggtggaggttgcagtaagtcaagatggcaccactgtgctccagcctgggggacagagcgagactccatctcaaaaaaaaaaaggaatcggacgaagaaccacaggatgttgaagacaactgtctgaagtatttgtgagggacagcgatgtggccctctgtgttaagaataacgtgtcctgctttggcagagagaagaaaatagccactgcccgctttcaaggcaagatcgaccttttctgttttgttttgtttttctttctttttcctggccatgaggacaaaaattactgagtggcccttaaagagggaagtttgttttcagctgttctcttttgcccgtaggtgggagggtggggattgctgcgtcctagctagaggaatggctttgcttgaatgtgtagtgcacacgcacgggtgtttctgtgtgctagttgcttcttgctgctgcttcctgcttgtctgggactcacatacataacgtgatatatatatatatatatataaatgtataaatatatattttatttttttttaaatccctggagcttctggttcctatcagttcctgttgttaatcgtagaaccgttgtcccttcccccattcccgtatccatcatgttctttttcttttaaatatcaatataaaggtaaaagaaggacttgtgctttcttaatgaggagggcggccgagcacggcgggcggatcacttgaggtcaggagtttgagaccagcctggccaacatggtgaaaccccgtctctacaaaaaaataaaaaagaaaagcgggggaggactctcggagaggggcaagggccagattcttgggtctagtgggagaatagggttggtgccaagacaaccttggcctcatcagaagatactagctggatctaggtcttctaaatgacttcctcaaaccaggagggctgggtgggatagaaatgaactagacttctccctccttggagtctgtcccctgagcacctcacaaatacaacgtcctaatttgagtgaaggagctttcctccccagtcacctcgtcctcccaggtccccccatttcagtaatagcctctcagagctgagaacccaagcacatggtggtaccttccccccgtctactcaagtcagtccctcatcaaacactgtctattcttccccctaaataccatttctaccgccctcttctccaggttcctggtccagctcaagttccattttgtttcacctgagctattgccccagcctccttctcctccatcccaccctggctccagagggattctttcatcatgcagatctgatcctgcccttccctgctgaagtccttccgtagcccattgcctataggcactatcaaagcccctgggtctggccttcatgatctgatcccgcctccattcccactatcagctccctccttaccctccaatctaagcctctgaatatacctggtcaacagaagaccttcataaagatcaaatgagctactgcaaccaatctctgtcccacagaaggccatcttgtccatttctgtaggctccaaccctatggggcttagcaggtgttctccccatgtgcagagatgagagattgtaataaataaaggcacaagacaaaaataaagagaaagcagctgggcccaggggaccactatcatcaagacgcagagaccggtagtggcccataacggctgggctcgctgatatttattgcatacaagacaagggggcagagtaaagagggtgaatcttcgaagtgattgacaaggtgaagcaagtcacgtgatcacgggacagggtgcccttccctcttaggtagccgaagcagagacagaaggcagcatacgtcagtgttttcttctatgcacttctaagatcaaagactttaagactttcactatttcttctaccgctatctactatgaacttcaaagaggaaccaggagtatgggaggagaatgaaagtgaaggaggagtgtaagcattgaagcacagcaccacagggaggggtttaggcctcgggatgactgcgggcaggcctggataatatccagccttccacaagaagctggtggagcagagtgttccctgactcctccaaggaaaggagactccctttcgtggtctgctaagtaacgggtgccttcccagacactggcgttaccacttgaccaaggacccctcaagcggccctgatgtgcgcgtgacagagggctcacctcttgccttctaggtcacttctcaccatgtcccttcagcacctgaccctatacctgccggttattcctagcttacattagtaatgcagcaaagagtaatattaaaagctaatgattaataatgtttataataatgattgataattgtccatgatcatctctacatctaatttgtattatgactattcttattctaactattttgtttattatactgaaacagtttgtgccttcagtctcttgcctgggcacctaggtaatcctccgcctacatatttcccggacctcaggagaatcacaaatacacaaataaatataagccctacaaaattcccagatcaggcccggcgggtggctcacgtctgtaatcccagcactttgggaggctgaggcgggtggatcacgaggttaggagatcgagaccatcctggccaacatggtgaaaccccgtctttactaaaaatacaaaaattagccgggcgtggtggagggcacctgtagttccagctactcatgaggctgaggcaggagaatcgcttgaacctgggaggcggaggttgtagtgagccgagatcgcgccacactgcactccagcctgggagacagagcgggactccgtctgaaaaaaaaaaaaaaaaaaaaaaaaaaaaaatatatatatatatatatatatatatatatatatatatatattccatgatcagccggcgcggaggctcacgcctgtagtcccaacactgggaggacaaggcgggaggatcgcttaagcccaggagttcaagaccagcctgggcaacacagcaagacctcgtctctatttaaaaaaaagttttaaagaaaattcgatgatcacagaacccgctatctgcatctacatccgcaaaagcaattggggagagataccgcaagggagggaagggttcccctggaaggggagaaggaaaggccagctggggcacacactgtcgttggatgaggaaaggcctccttttcatttctgcagcgtccactcttgagctccaacccactccatcgctgtcttcttaaaggacgcctcgcccacccttctctcccatcccatgcctgaatcccttctggaaggcatccgaaagaacagctatagaactctggggtgatacgttggttaactcgggaaagaactcaaggacactggactagaacgtggtgggattcctaggtcggtttcggggccatccccgccgcctatccttcgccctaggtcacctggaggtggctggaaggccagtggactccacatttagggagagtggttacaagaggactcggattcccccaccttcccttcggctttgggaatcccaggaaacccgccccgaacccctgaaaagtcccagagaaggtaagctgggcgtccagagtccctcccaggcgccgccgcagcgtcccgcccagcctcgcggggcacgccgggaggcggagttctcggtcgtgtcccgagagtggctggtccgcaggctcggactaccagtcccagaatgcactgcgcccgcagcccggggcgggccgtggttgcccctggcaacagagagggtctcccgggagcggggactgggaagcgctcccgagccggggaggcgcagagcccgaccagagagaggcggggacgcgggtagagcgaccaagaggtgtggaggccggaagagactgaccgcgccggcccttggagagacccctttcctgagagggggcgcacagagaggatgccgaagccagcgagatctagagagagggagacagggattgaatcacagagacacttagagggagggagagacctcaaagacagagagattcacagggccagagagacacgtagagtgggtcagagaagaggacagaggacagagacatagaaaagacaggagggagagagactgaatcacagagacacagggagagagggagagacctcagagatggagagagactcacagggccagatagacacatggagtgggtcagagaaggggacagagagagagacacagaaaagggaagagggagagagactgaatcacagagacacagagagggaagtctctatctagagaccctcgacagagattcctagagccagagacagagattcagagagccagagacacagagagattcatagagacatatagagagattcagagagcctgaatcacagagattcacagagccaacgagacaaacagagagattcatagagccagagacacagattcggagagtcagagagacatagaaagattcatagagccagagacacagagattcagagagtcagagagacatagagagacattcatagagccagagacacagagagattcatagacatatagagagattcagagagcctgaatcacagagattcacagagccaaagagacaaacagagagattcatagagccagagacacagagggattcggagagtcagagagacatagaaagagattcatagagccagagacacagagattcatagagacatagagattcatagagccagagacacagagattcagagagtcagagagacatagaaagacattcatagagccagagacacagagagattcagagtcagagaaacatagagattcatagagccagagacacagagagattcagagtcagagagacatagagagacattcatagagccggagacacagagagattcagagtcagagagacatagatttatagagccagagacacagattcagggagtcagagagacatagagagacattcatagagccggagacacagattcagagtcagagagacatagacattcatagagccagagacacagattcagagagtcagagagatgaatagattcagagagccagagacacagggagagtgaatcacagacacagagggacggggagatccccagaaacagaaagagattcatagagccagagagacaaatagagattgggtcagagagaaagggacagagacagagacagagaagagaagagggagagagattgggtcagagagaaagggacagagacagagaagagaagagggagagagagactgagtcatagacaggagagagacccccctagcatcagagagagagagagagatcaacagagccagagagggacaagtacagagaaacagatggaaccagagagatataggaagagacaaacaaaaacagagacggagttgcagaaccggaggaagggagagagacagagacaaaggcatttataaagacgggtggaggtgaggagagagagggagagacaggggcaagcatttagagagtgactcccagagaggaagacagagacggactcccaaagagatcaagttgcagagggagggggagacagagtcacagcctgagagagaatagagattcacagagccagagagacaaagacagggaaagaaacaaactcagggagacagaggcggaagaatttatcagacgtagagggagagacagagggagactgattcacagtgaggcagaccaagaccccgagaagaaccacgacaccaagacccagagatggcgacagatacagatggagacacacagcagaggaaatagagaaatagaaagaaatagaaacagcatttctcggagacagggaaaagaaaacagatccactgagaggcagaaacagagacacatcgagaaagctcgctccaggaatagagggagagggacagaggtcacaagaaagacacacgcaggcagagagctacacaaataatggagaggccaggggaggaaataaagactcagccggcatcggagaaagtgagaaccttagcgccctgcctgtccactgctggacccctagcgtggagcataaagtttgttgaaggaaggagaggggcagggtcagacacagggaccccagggcgcccacaggacacacgaggcaccctagtgggggaggaacgcggggcaggatgacagattgcagggtggtgggggggagccaggctcagaggatgcccctccctccagccagcccccggagtgggtgtgtgcacgtgtggggggcggggagggaggacatttgtcccgtgtctccgggaggggagcgcctttaagccgaaaccccgccctctcggtcgtcctggcaacgcctcccccaacccggggctcccacatttcagcaggtgccggagctggagctcccaccgccgccgcccgtgcctccggctgccggcgcccctgcctttggctcttcctccccactcgcccgctccccctggcggagccggcgcgcccggggtgccgctccctgcctggcgcgctccgcacctggaggtgccttgcccctctcctgcccacctcggaatttccctgtggctcctttgatccttcgagtctccagctcctctcccttccacctgtttcccccaagaaaggcaggatcctggtccctgctacgtttctggggccatggctggtctgggccccggcgtaggcgattcagaggggggaccccggcccctgttttgcagaaagggggccctgaggcagaaggtggtccacgaagtcaagagccacaagttcaccgctcgcttcttcaagcagcccaccttctgcagccactgcaccgacttcatctggtgagggaagggggctgggggactgggggacgaggggactaggggtgcagactcctatcacgccgacccctgtggaaggaagaaggagggggctgtagtcccgactcccaggttctaggatggccagggaacgctgggagcttcgactcctgggtttcagtgaggaggaggctggttcctggagtgctgggtccgagggaggaggaggctggaggacagaggtcctggagtcttgggtctgagggaggaagggcctggggggctgggagcctggattcctgggtctgaaggaggaagaaactgggggctgaactccagtctaagggaagaagggctgggggccaaaatttctgggttctagaaagaggaggtggccggggcttggacacctgggccctgcgggaggagggtcagagagcgcaggccccctgtggctcgcagaggttgggggtccaggtacccctttctgcactgacctaggatccctgactcttccaggggtatcggaaagcagggcctgcaatgtcaaggtaagagctggggaccggggctcctgggaccctcaggagggtggaggctggggccccacagctgaggctgcttgacacacgtgttctctggtccccagagaggcgcgggggagcccggggcggggggtgtggcagagacacagcctgtggtggggagggagctttgatggtggggccaccgcggaggtggtgctgggggcccctccctcggccggctccaggtggggacagatatttggagaatctgttgccatgggaacatggagatttggaaaaggggagctgaaggggggaagggggagggggctggagatgcaaagtcagagcccccccccaccccaggctgccgtcgccatgacaacaccagccgtcctaggcaggggcaggccgggtggggtcaccaatgggcgagtgggggccgggcggggccggcagttctggggggcgggagaggggggcgagtccttgagcaccagctgctactgctgagaacagagtgagtcagggtggggggcgggccggcagcagcgcccccagactcacttctgcccaagttgctgcttcctgggctgcgtctgaagatatttcggttttcgctctttgaatctgtctgcctctctcctggctttctgatctccgtccgtgggcctgtgtctgtttgtcaatgggatcctattttctttctctctttttccatctcccttccctgagctctgtgctctgtgtctctctgtaagtctctgcgtctctgtttctgactctgagcccatctcttgggtttctgtctcctgcttctctctctggcctccgattttctctctgttggactctctgtgttgagatccctctctttctggttttctcagtgtccgagttccgctctctctttccaattttctgtctgctggggtctcccgctggactaatccatgcctccgtctgtgtctctatgattttcatctatagtctgcagctttgtggttcatcgacgatgccacgaatttgtgaccttcgagtgtccaggcgctgggaagggcccccagacggacgtgagtgctcggacacctggttctcctcctcgggccgtgcccccgccctcaccccctcggcgtccgtcccaatttctcctgctatttttatggctgggaggggaggggggctggagagatagggggagctatctggcccagattccttgcccttggcctggaaagggggaatgcgagggggactgacaggctggggacacgggtggggcacagagaggaggccggggtgaggagactgaagatgggtgctgccgggggtgggctgtgatccaggggtgaagggatttaaaaattgagagctgaggggcacacggagaaaaatatcagtgcaggtgcggagatgccaacataagacagagggaatctcagggagaggaacagagacagaagaagacagagacctaggagagactgaagctgaggcagagagagagagagatggagcagagaaagaaccagggagaaagagaggaatttggaggcaccaaaagatggacagagaaactccaagagacggagacacagacacctggagaaagagactaaaatagaaaatggtggatacagacaacagcttaggagatgctgagaggagacccagggaagtcccacagtacacttgcacacatgtgcgtgcatgtacagatgcccctgtcatcacagatgtgcagcacgcagagacacacagcctctccccaccccctctctctccatcagaggctcacaagaccagtcaaccctgagtgcccattcccgttcccttttctgctttatctctgagcctcagtttcctcctctataaaatggggctgatgatctagcattgaccaacagaactgtttacagtgacggaagcattctgtacatgcactgtccaataggcagccaccagctccatgtagccagtgagcacttgaaacagggcgactgtggctgaggattagaaattccatttcgtgtcatttgaattggcttaaattttttttttttatttttattttttgagacggagtcgcgctctgttgcccaagctggagtgcagtggcgcagtctcagctcaatgcaacttccgtttcccaggttcaagcaattcttctacctcagcctcctgagtagctgggactacaggcgcatgccaccacaccccgctaattttttttgtatttttagtagagatggggtttcaccatgttggccaggctggtctcgaactcctgaccttgtgatccacccgcctcggcctcccaaagtgttgggattacaggcgtgagccaccgcgcccggcagaactgacttaaatttaaacagccacatgtagttagtggccaccaaatgggacagcacacatctggacacttccaggcttgttttgaagtcaggtgggttcagagtttcgcccagggtttgacacaagatcggagacagttttatgatgtacagatggagagagaggcagagagagagagatccacagaagtccatgaggcgttttaccaccctctcagctgaaaataacagaagtctacatagaagatgtgacttcatagaacatatattgagcaccactgtctaccagcacgtgtatgtgattgatgacccccctcgtccactcacctccgccaccaacaccagataagtctgatgcatccagtgctcattgggtacactcatcaagatttttttttttgttttttgcctgtaatcccagctactcgggaggctgaggcagaattgcttgaacctgagcggcagaggttgcagtgagccaagatcacgccactgcactccagcctgggtgacagagcaagactttgtcttggaaaaaaaaaaaaagatttttttttgtttttgttgttttgtttgattttggggtattttttagatggagtttcactctgtcacccaggctggagtgcactggtgcaatcttggttcactgcaacctctacctcccaggttcaagcgattctcatgcctcagcctcccgagtagctgggactagaacaggcatgagccaccatggccggctaatttttatatttttagtagacagggtttcatcatgctggccaagctggtcttgctcctgacctcacgtgatccacccacctcggcctcccaaagtgctgggattacaggcgtgagccaccgcacccagccgatttttggggttttttgagacagggtcccactctgtcacctagactggagtacagtgatgggatcatagctcactgcagccttgaattctccaggctcaagtgctcctcctgccccagcttctcaagtagctgggactataggcacaagccacaacacctagctaattaaaaaaaaatgtttttgtagagatggagtctcactcactatattgcccaggctggtcttcaactcctggtctcactcgattctcctgcctcagcctcccaaaatgatgggattacaggcgtgagccactgcacctggcctcaagtattttgtatacagtataggttggatccacacaacagcttatttggttatttttccctgtctatctggtttgaatcccagctccaccactttttggttctgtgacatttcctgagttaatttacctctctgcacttgttgaattccttgtttgtaaagtggagatgataattatgctcactatggattgttttgaagatttagtgagtcagacatttgggatggtttctgacacatagcaagagccaaaatattattttttattcttgttaaaattattattatgaccaatgaggaaacgagtgaatagtgagaaggagatctttcctctgcatcactcgggggtttttttgtttttgtttttttttgctgttgagacagggtctcactctgttgcccaggctggagtgcaatagtgctatcactgctcactgcagtcttgacctccggggctcaagtgattcactgctggcagttgatcttcttaaaagtaacatgcaggccaggcacagtggctcacgcctgtaatcccaacactttgggagaccgaggcgggtggatcacctgaggttgggagttcgagaccagcctgaccaacatggagaagccacgtgtctactaagaatacaaaattagctgggcgtggtggcacacgcctgtaatcccagctactcaggaggctgaggcaggagaatcacttgaacccaggaggcggaggttgcagtgagccaagattgcgccattgcactccagcctgggcagcaagaacaaaactctgtctcaaaaaaaaaaaaaaaaaaaaaaaaaaaaaaaaaaaaaaggtaacatgccttgaccaggcatggtggctcatgcctgtaatcccagctctttgggaggctgaggcaagcggatcacgaggtcaggagatccaaaccatcctggctaacgcggtgaaaccccgtctctactaaaaatacaaaaaattagccaggcacggtggcacgcgcctgtagtcccagctactcgggaggctgaggcaggagtatcgcttgaaccccggaggcagaggttgcagtgagccgagatcacaccactgcactctagcctgggcgacagagtgagactccatctcaaaaaaaaaaaaaaaaaaaaagtaacatggatcaagatttggcaagaatgatttcatttagtccccagggagggcacatgcccccacttttcaagcggtaaatctgaggctttgaaaaggggcaggcgtggtgaggccacctagctgggtaggggatagaggcaagatttgaactctgatgtatgtaaccacagcctccgtgctgtctcctttttaacagcgacgttcacttttgagaataagaacagcagcctctgtctgtggatggtttgtgtgtcaggcagcctgctgagaaccttcacacacagcatcttatttagtgcggcaggaaccctttgagttagggtcagcggagatatttagaagcccagcacattgaaaaggatcctggaaactgccaacaccctcctctacccaaatatatattcaaactagaaaccccactaacatagatgaaaatccaagaatggcctaaatgttcaccctgtgataatccttttaatggattcttagaatcaagttatttaacaagcagatattgtcccgggggtagtgggtggcaggggagaaggagaagcttcactgatgacctgcattcttgcttaatggactctggaaatttagcattgcttcaaaatatagattatttatttccacttgacagaggaggatgctgaggctcaaaactgggaatgaacttgccccaaatcacacagctgagaagcggcctagctcttacttacattcagggctatgtagggacttcaataaaatccctaacaataaccacagtaatagtattgggagcatctaacgtggtaggcacagctatgttttgtacaccaattattttatttaggcctcctgggttcctattataactgagaggtcatgttctccattccacctggagctcagagaaggcataccatatggacactgacagaagctgccagtgaaggagctggggttcagggtggcccacaagtcctcaaataataacttgtgggagttggggggatgggaactatgggaggttggaagctcctgcctccttcatgttctgcccagatatcatttggtcagcgaggcccccctgccactccccctgcacacagttttgttgttgttgttgttgtttgagacagaatcttgctctgtcatccaggctggagtgcagtggcacaatcttggctcactgcaacctcggcctcctggattcaagcaattctcatgcctcagcctcctgagtagctgggattacaggcatgcaccaccatgtccggctaatttttgtatttttagtagagacagagttttgccatgttgcctagcctggtccggaactcctgagctcaaggcaatccgcccacctcggcctcccaaagtgctgggattacaggcatgagccaccgcacccagccaggaccaccgtatttaaaatttcaatcccccaacttctggtggtccccatccctgcctcattttttctccagagcacccattaccaaccatcaaactatatgttttatttatttaccatgtttacattctgtatccctccattaggaagtaaactccatgtgacaaagaggtttttttttttcatttgtttaatgctgggtccccacaccaagaacagtccctggcacacagcaggtgctcaatgattattggtacatagagtgaaagagatggagcctcaggctgacctagagagcaaggcaggaggaaaagataaaagggcccctcccctggggttttaggaccctcccaacgccccctaagccagtcttctctgcccccaggacccccggaacaaacacaagttccgcctgcatagctacagcagccccaccttctgcgaccactgtggctccctcctctacgggcttgtgcaccagggcatgaaatgctcctgtgagtgacctgggccttgccagggcccttccaaagcgcccggtctgggttccgggaaatgcccgggatggggtggggggtggagtcttggcttgggggcggggcctgaggtgctacccgcagctttcccctccaggctgcgagatgaacgtgcaccggcgctgtgtgcgtagcgtgccctccctgtgcggtgtggaccacaccgagcgccgcgggcgcctgcagctggagatccgggctcccacagcagatgagatccacgtaactggtgaggccccgccccctcgcctggccccgccccctccccaagtgtgaggcggggctgacccaaggcacttgtgctggcccagccctaccccaaagatggggccacgcctctttctatggtcacgcccacactcctgaccccaccccaaaggccgagcacacccagccataccccttttggctcgaagccccgcctccaacctggcttcttgcaactttctgcacctgttaatgactttgactttctttttttttttgggacggagtttcgctcttgttgctcaagctggagtgcaatggcgcgatctcggctcactgcaacttccgcctcccgggttcaagtgattctcctgcctcagcctcccgagtagctgggattacaggcgcgtgtcaccaagcccggctaattttttgtatttttagtacaaacggggtttcaccatgttagccaggctggtctcgaactcctgaccccaggtgatcccctcgactcggcctcccaaagtgctgggattaacaggcgtgagccaccgcgcctggccaatggctttcttttttgtttttattttatgtttatttttttgagatggagtcttgctctgtcacccaggctggagtgcagtggtgcaatcttggctcactgcaatctctgcctccggggttcaagggattctcctgcctcagcctcccgagtagctggaattacaggcgcctgccaccacatccggctaatttttttttttttttttttttgagacaagatctcgctctgttgcccaggctggagtgcagtagcatgatctcagctcactgcaacctccgcctctcaggttcaagcgattctcctgcttcagcctcctgagtagctgggactacaggtgcatgacactgcacccagctcatttttgtatttttagtagagacagggtttcaccatgctagccaggctggtctggaactcctgacctcaggtgatccgcccgcctccgcctcccaaagtgctgggattacaggggtgaggaccgtgcccggcaatggctttctgggtataaggatcttgagaagggagagtacctggttctgagggaggctgtggttcagtactggtgacatggccagggtccaaactctggttcctaatggagagaagggctctggatctgatttcagggtcactggttgcggaaagggctctatgccctgtcttctgggttctggagaggtaagaagtcatgagaaacgagactgagagcttggaattcttttttttttttttttgagacggagtctcgctgtgacgcccaggctggagtgcagtggcgtaatctcggctcactgcaagctccgactcctgggttcacgtcattctcccgcctcagcctcctgagtagctgggaccacagacacctgccaccacgcccagctaatttttttttttttttgtatttttagtggagacggggtttcaccattcacaggatggtctcgatctcctgaccttgtgatccgcccgccttggcctcccaaagtgctgggattacaggcatgagccgccgtgcctggccaagcttggaactcttgattgctgactggaggagggctgggagccccttcctggatctctaacccgtcacactcttcctcactccccgtttagttggcgaggcccgtaacctaattcctatggaccccaatggtctctctgatccctatgtgaaactgaagctcatcccagaccctcggaacctgacgaaacagaagacccgaacggtgaaagccacgctaaaccctgtgtggaatgagacctttgtgttgtgagtctggggtgcagggaaggcaatgacagctgacagagaatgatctgagggtcctagtggcccccagagagcagctgatgggaggggttaggatagagggaacccagaaaagggcagaagaagatggtgggaaaagggaatagagtgattgagggagtgggatggagatacagaaacggagagacagccagaccactgtataattagtctccattgaagcccccaactttagagttagacagagatgagagagagaagagagagtctcagaagaggcagaaacccaaagagagacacagatggagagggaggggagaagatgggggatggcagggagacagagatcagttgacaggaagacagagtgatagagacccagagaggagagaagggtacagagactcagagagagagatctcgagagacaagagacagagatgggaaggggcggagaatgcaggaggaagggagaggaagagctctctaggtttacttcaggccccaaagccctagctggagagagagcccggctgggaaggtcagaggtcggagaccgacaaagcaggagaggagccccagctggctgggtttgcccccacctccagcaccaaggatggggaaccgaggggagccatgagctcggctctgcaccccatccaccccaccttcctgcagcaacctgaagccaggggatgtggagcgccggctcagcgtggaggtgtgggactgggaccggacctcccgcaacgacttcatgggggccatgtcctttggcgtctcggagctgctcaaggcgcccgtggatggctggtgaggagcagggctggggcctggggatggagcgcaatattaccatctccatctgtgtgtggtctctctcctccaggccactgtccttccctctgcctcccagcatgcgcacacacacacacacacacacacacacacgcacacacacgcacacacccctctctctctattcttctcttcttctcccctccctttctccctctccctctctttttatctcactctttctctcttccatctctgtgtccgtctctctgtgtctctttcctcccttccaatgtctttgcctctcccatgggtgccccatccccgctgcccgcctctggtctccgtctgtatgtcaggtacaagttactgaaccaggaggagggcgagtattacaatgtgccggtggccgatgctgacaactgcagcctcctccagaagtttgaggtacccagaccctggcttcctcaagggagcccagcccagcctcccacggttcagagctggcctttccttccacccctgagtgcccgctggtcctgggactacagttcccagaagaccctaggactccctcctctgctcttctaggggactcgagccccagggtctgatgggaattatagttcctatctatcgccatggcttgagggtactaggggccaccagcccctgttctagggcgatcccctgcatctcttgggaccctgactctctctttcttttctcccaggcttgtaactaccccctggaattgtatgaggtgagtagaaccagggcgttgaatggaggcagtttttgcctacttctctgatttcttattcctcctctgacttctgtcttcaattccccacacatgagttgagcacacatttgtgctaggcctgtcttgtgcttgctgaataatccaggatccagagatgaatctgaccctcaagcaactctccaaggtagggacacagtcacagatacttaaaatacaggaagatgtgctaaattagaggtagcccagggcactgaagaggcctaacggaggcactaatccagcctgggggagggtggtcagggaggacttccctgaggaggtgacgcctgaattgattcttgaggttttttaaaattttttaatttatttttatttttatttttatttttatttctgtcgcccaggctggagtgcaatggcacaatctcgcctcactgcaacctccagctcccgggttcaagcaattctcttgcctcagcctcctgagtagctgggattacaggtgaccgccaccacacccagctaattttttttttatttttagtagagatgggatttcgccatgttggccaggctgatctcaaactcccaaactcaggtgatccgcctgccttggcctcccaaagtgctgggattacaggcatgagccactgcgcccgaccgattcttgagttttttattttttttttgagacggagtctcgctgtgacgcccaggctggagtgcagtggtgcgatctcggctcactgcaagctccgcctcctgggttcacgccattctcctgcatcagcctcctgagtagctgggactacaggcgcccaccaccatgcccggctaattttttgtatttttagtagagatggggtttcaccgtgttagccaggatggtctcgatctcctgacctggtgatccacccgcctcagcctcccaaagtgctgggattacaggcgtgagccaccacacccagccgattcttgagttttaaaaaatctatcaagcatgatcatcttaatctctccattcattcattcactcactgaatatccttctttttctttctttctttctttctttttttttttgagacagaatctccttttgtcacccaggttggagtgcagtgatgcagtctcagctcactgcaacctctgcctcccagattcaagtgattctcctgcctcagcctcctgagtagttgggattacaggagcgcaccaccacacctggctaatttttgtatttttagtagagatggggtttcgacatgttggccaggctggtctcgaactcctgacctcaagtgatccacccgccttggcctcccaaagcgctgagattagaggcgtgagcgaccacgcccagacgaatacccattttctagggtgtcataagccaggccctgttctgggaatagaatcaggccattccctggtggagctcttcttctagtggaggacaaagttacaaacccagacattcacaacgaggagcaatgctgctgtaatggagacagcctcaggcactggggcgtccctggcacagcctgagtcagagaaagcttcctagagaggtgagacctggtagaagggcgggatttcccaaaggagagaccagattttcaggcaggaggaagtaatgctctctccctcatttaccctttcaaaaaatactttacagagcatctttgtgtgccaggcgtggctctactcactggggatatagagaaagcagggaaagaacaaacaaacaaacaaaaaagttcctttccttatgggatttacaccgggaggaagacattaaacaaaatatataagcatatgatagactgggcacgatgcctcatgtctgtgatcctagtaaggcgggcggatcacctgaggtcaggagtttgagaccagcctggccagcgtggcaaaaccccatctctactaaaaaatacaaaaatcagctgggcatggtggaggcgcctgtaatcccagctactcggaaggctgaggcaggagaattgctggattccgggaagtagaggctgcagtgagcccagatcgctccactgcactccagcctggatgacagagggagactctgtctcaaaaaaaaaaaaaaaaaaaaagaagacaagaatcttcaagattcaacaacagcaacaacatgttatagtctttactggactcttacagaaactttcaccagagtttttaatgttgtgtgtgggggttcacctgcatcagaattcctagagtgcttgcttttaaaagcacattccccagcctttctgcagacctactcagtgacgatctctctgatgcctcaaatgtctgcctactaaattaattcctcaggtgatccttttgcaaagttaagtttgagaatgggctctgcggccgggcgcagtggctcacgcctgtcatcccagcactttgggaggccaaggcgggtggatcacgaggtcaggagatcgagaccatcctggctaacacggtgaatccccgtctctactaaaaatacaaaaaaattagctgggcgtggtggtgggtgcctgtagtcccaggtactcaggaggctgaggcaggagaatggcatgaacctgggaggtggagcttgcaatgagccgagatcgtgccactgcactacagcctgggtgacagagcgagactctatctcagaaaaaaaaaaaaaagagagaatgggctctgcaggagacaagggtaccagcgggaggacattctgagccaaagaggtagagtcttttgagatcagcagggatgatcctcccgtacaaacccaagaaacccagcagggcagatggtgggcaaaggcctagaggcagggagtgtagggtggtgtgtgtgcctgttgtggctcacagcactctcccacagttcagcaggcaccacttaatattaccaatgaacaccaactctgtgccaagccttgagctaggtacggggctaacaacacagcaaacagaaacagccctgattattattattattattattattattattattattattattattatgtatttatctatttgagacacagtctcgctctgtcgcccaggctggaatgcagtggagcgatctcagctcactgcaacctctgcctcccgggttcaagcgattctcctgccttggcctcccaagtagctgggactacaggcatgtgccaccatgtcctactaatttttatattgctagtagagatggggcttcgccatgttggccaggctggtcttgaactcctgacctcaggtgatctgcccacctcggcctcccaaagtgctgggattacaggcatgagccaccgcacccagccctcaacaaatatttatgtagcctcaatgaggtaggcagtgttactgtgtcttagcgaacaaagcagacccctgccttagggagctcacaggcagaaagcagatagtcacacagatagatgtaaattactaagaataaaagtgccaggaaggtgctgtccatggtgaccaaggggtggtaagagaggcatctgacccagtttaaaaagtcaggcgaggcctctatgaagtgatgcttgagtcaaggtctaaagggtgtttgggagacaactaggagggaaggggaggggagagctttacaggaagacctaacggcacatccagaggccctgaggtgggagggaggacaatgagtgtcaggccagggtggctggaccatggagcctgggagagagaagaacaacctgcagtgtcagtctcagcctggctctgcaagtcatgtggaataaaatcttaacacagagggagcagttaaagggtttacaagcataggggagacatgacctggtttatttatttttaaattggctcctgtgcctgctgagtagagaatgcattagaaagggcagccgtccatgtagagggacaagtgtggaagctgtgacagcagcttagtcttgggccccctccctggggggccgaggcaggaaaaggtagagaagggaccctagctgaaagccaggtgtgctccctggactggcagcacccatgtcacccagaagctttttacacataacgattctcaggtcccaccccagatttatagagttagaaaatctggcagtgggacccagcaatctgttttaccaaaccctctagggaattccggcttagaggctaagagcaaccagattctagagctggactgcttgggtttcatttctggctctgtcctttacctgctgtgtgacttggggcaagttacttaacgtctctgtgctagtctcctcttctgtaaaatggaaacgatagcagggttttctggaaacagcatatgataagctatctaaaaaaaaaaaagaagaaaaaaagagctaagtgtttgttgaataataaataaaccctccaggctatggggagtcagagaaaattaagccaaggacagggtaggagggtggccattttcctctgtctagcgattctcatcctttcctttcttgggtgctgtgtctcttgggagcatttccttatcgctgtgtaaggtctaactgcctctggctctttctttctcctttccacagcgggtgcggatgggcccctcttcctctcccatcccctccccttcccctagtcccaccgaccccaagcgctgcttcttcggggcgagtccaggacgcctgcacatctccgacttcagcttcctcatggttctaggaaaaggcagttttgggaaggttggattcctggggttctgggggaaagggaggatgtctgtgggaaggtcagatttctggttcttagggaggaagtgggggtgggaagagactgggctcctgcatcttcaaatatggttaggttgggccgttcaggttcctggagaggagaggtttacagatgtggacactctccttgaggggacgggcggcaagtcagggctgtcagtcccttaagagatggaggaagggcctgggatcccgtttccctgcgtcccttagggagggggcaggtcctgtaccactgggttcccaacatggactggcccttttggaactgtgcgcataggtgatgctggccgagcgcaggggctctgatgagctctacgccatcaagatcttgaaaaaggacgtgatcgtccaggacgacgatgtggactgcacgctggtggagaaacgtgtgctggcgctggggggccggggtcctggcggccggccccacttcctcacccagctccactccaccttccagaccccggtaaggatggagggggcggaggctgtcctccgggccctgccttatccagttctggacatctgcgttgggattctgagtttagggcgaggcaagagaactttgtgctctctgagtgggcgaggccaggcggattgtctcctcagggggcgtggccgggggggggtccttggggggcgtggccaggcgaagggactcatcggggggcgtggccaggcggaggggctcaacggaggcgaggccgggtggaggggctcctcgggggcgtggccaggtggagggactcatcgggggcgtggccaggcagaggggctcttcgcggggcgtggtcaggcggatgaaatctttgggggggtggtttagaggggcgggctttgtcaggcgatgggatcattaataggcgtggccaggcagattggctccttgggggcgaggccaggcagacgagattatgaatgagcgtatccaggcaggtagattcttcggagggcgtggtcgggcggatgagctcctcgggggcgtggccaggcggtgagttcctcggtggcatggcctggccaggtgaatgggtcctgcggaggtgtcgtgaagcggttgagttccttgggggcgtggccaggtggatgggctcttggggggagtggccagatgcctgtttccctggggagcttggtcttgagtggctgtagccagtgctctggaattttcagcaaaggggcacagtggaggagggtgccttcctagtgggcctgcccagaattgggctccgagtgacggggtcatcacttttggattctgactgaaggacacatcagaaacaggacattatttccttaggattgcgacttaggggcagagagtcagaacctgcaagattttaagagggcgtgactttacttccaggggctccgaatgagagtggccagccacctggattaaaatatatgtatgagcaactttgattcctttttttttttttgagaaggagttagctcttgtcccccaggctggagtgcaatggcgcgatctcggctcactgcaacctccgcctcccgggtttaagcaattctcccgtctcagcctcctgagtagctgggattacaggctcccgccaccacactcagctgatttttgtatttttagtagagaccgggtttcgccacgttggccaggctggtctggaactcctgacctcaggtgatccacccgcttcggcctcccaaagtgctgggattacaggcgtgagccaccacgcccagctgcaactttgattcttagtaggaagccagaattgcatctgtgtgtgagtggctgtggaaagagattttggtgttcccggatttcgagcgaatggtgggcttcagtcttcaattctgagaaggcggggccagaacacgtggtctgatagttggcggtggtctggcgggtggagattctgaggtagcaggattagcaccttagggccctcccagggatgtggctaggtgctctgaatttctggttgggtgcatctggaaccttccacgtctgtcctgagtgatcaggaaagaaattctcctactctgggtagatggatcccgcctctaagcccatgcacttctccgcaggaccgcctgtatttcgtgatggagtacgtcaccgggggagacttgatgtaccacattcaacagctgggcaagtttaaggagccccatgcagcgtgagtctcggccaacagagaatggtcggggtggtggaagggggcaggatccagccactgaccttctgacgtccccacccaccccgtcctccaggttctacgcggcagaaatcgctatcggcctcttcttccttcacaatcagggcatcatctacaggtgagcagccccaggaatttccgtggaggaaatcacgcccctggaagggaagggatttgaatatgtggctctagactgctgaactcaacacttcttgcaattcctgccccacacccctgcatcgtccagggacctgaagctggacaatgtgatgctggatgctgagggacacatcaagatcactgactttggcatgtgtaaggagaacgtcttccccgggacgacaacccgcaccttctgcgggaccccggactacatagccccggaggtaaccccaaccctgctgctctggtcacgctttgagatcccttagagggtgtagctgatggtccagtattcaccacgggtgaggcctgaccctcagaccttgtcatgagttgtggccttcttacacagccagtcgttcctccagcctccagcacaggtgagcttggcactgagcctgccaggtgggcccagctgggtctctaaataggtaaggtgggcagcacctgtgggtgaatgttccaggagagtgggaccagctcgtaggaattccaagtaggacctgaccctggatccttctgagaaggggcagacgatttctagtgtactctgagtgggtgtggcctgtcccctgccaacactgaacatgtccggactatcttctgaatactttaaactgggcagggctctccctggagtattcagttggatggaagcttatttcctgtgttgtacgtgtttctctgatgtaagtgtactggacttctgtgctgcatttttcaagagggcaggatcagctgggcgcggtggctcacacctgtaatcccagcactttgggaggctgaggcaggtggatcacttgaggtcaggagtttgagaccagcctggccaacatggtgaaacctcatctctaacaaaattacacaaattagccgggcgtggtggcatgcgcctgtaatcccagctattcgggaggctgaggcaggagaatcgcttgaaccggggaggcggaggttgcagtgagctgagatcacaccactgcactccagcctgggtgacagagcataacttcataacttcatctcaaaaaaaaaaaaaaaaaaaagccgggtgcagtggctcacacctgtaattccagcacttgggaggctgaggcgggcggatcacaaggtcaggagtttgagaccagcctgactaacatggtgaaactccatctctactaaaaatacaaaaattagccaggcgtggtggcgggtgcctgtagtcccagctacttgggaggctgaggcaggagaattacttgaacccgggaggtggaggttgcagtgagctgagatcgcgccactgcactccagtctgggcaacagagtgagaccctgtctcaaaaaaaaaaaaaaaaagaaaaagaaaaagggcagggtgagatccctaaggttctgggagagcagatgctgtcctatgagtattttaagtgggtggggtattacccgactttgttaaaggggtggggctgatgttctgaatgtacgtatagatggataaagcacatgcctgtagtcccagctacttgggaggatgtgcctgactcgtgcccaaataatcaatgtcagtgatcacaaaacctggctggtaatcagaatcatctgtagaaaatttgaaaactgaggccagacatggtggctcatgcctgtaatcccagcactttgggaagctgaggcaggcagatcacttgaggtcaggaattcaagaccagcctagccaacatggtgaaaccccgtctctactaaaaatacaaaaattagctggacatggtgatgtgtgcctgtcaacccagctactcaggaggctgaggcaggagaatcacttgaacccaggaggtggaggttgcagtgagccaagattgcaccactgcactgcatcctgggctacagagtgagactccatctcaaaaaagaaaaaagataagaaaatttgaaaactacacacatattcctgactctgacacaaatattctaggtgggtggaaccagtgacttggccgttaggtagtctttctatttgaggccaaatgaatgtttgaagtaggtatgctttgtttccagaatattccaaaagttagatcgctggccaaaatattcagagtggaggctgggcgtggtggctcactcctataatcccagcactttgggaggcggaggcaggccaattgcttgagtccgggagtttgagaccagcctgggcaacatagtgaggacctatcttcactaaaagtgcaaaaattagccaggtgtggtggtgcacacctgtagcccacctacttgggaggctgaggtagaagaattacctgagcctgggaagttgaggctgagtgagccgtgatcacactactgtgctccagcctgggcaacagagtgagaccctgtcaaaaaaaaaaaaaaaaaaaaaaaaaacgaaacaaaaaatcacctgatgaaataaatattcagagtgggaagagcttgtgctgaaagcacttaacgtgggtagcgctcccagggggtgaggccagaggggtcctaggcttcctaaagaacgcatcatgattccctgccttccacctcccctagatcattgcctaccagccctatgggaagtctgtcgattggtggtcctttggagttctgctgtatgagatgttggcaggacaggtaagggaaggtggggagaagctggcttggctaaaagagacagagaggggcacctggatctcaggaggagccagttagaaaggagcccagaaggttgtgctcgaatagcgctgtccatggttctgaagtgttgtcttaatgtagaccaggtgttttgttttgttttgttttgtttgttctgttaccatggattctttctccctagatggtaaagtagcagtctggttaagcctatggatcccttctcagaagaatgtttttcaatgcacaaaatagaataatacatacgcagaaaaccaaggttcaaatcctcactttgccacttactggctgtgtcagcttagacaattacatacattctaaatcagcttgattggattcctggactgctgagtgtactacaactaaaaaaattggttaccacactcttgatcatcttcttagctggctatggtagtgggcacctatagtcccagctactggggaggctgaggcaggagggtcacatgagcccaagaactcaaggttacactgaactatgagtatgccactgtgttccagcacaggcgacagagcaagaccccatctcaaaagaacaaacaaacaaaagaaatcaatcattttgaaagatagtcaccaaaacttttaaaatttaattgaatctaacaaccaactaaattcaatgtatacagttgtctaaatatttaaaattggaaaatggacatatgtgcaatttcttattaattcattaagtagtaagttctaatggtagtaaagtaaaaaggagctctaacagtaattttgatgtagcaatgactaataatttggaatatctgcaactctcatgtgatgagaaaatacctgtgattactattgataatgaagccacaagcactgctgctgcctgcattcataactgaagggaatgctaaattttagttagaagttaaaaaaaaatttggccggacatggtggctcacgcctgtaatccaagcactttgggaggccgaagtgggcagatcacttgaggtcaggagtttgagaccagcctggccaatatgatgaaaccccatctctaaatctttgccttggtatcattttttgtaacctcagaagactgtgaactactcatccaaccaggagaatgcttttagggtgtttcctgcagtttttcctctcttctatttaactgacatgttgcataattaacagcctgctgatttacatagcagataaagagaggcagaatagtacagagatgcacagatctgaggcatccgagataggaaatgagagaacctgagaaggagagagatcaagctttggtggtttggtctgatctctcctgagggtgtggtcaggtgtgcatgtggggcgtgtgatgggtcaggcatgttcccggtggggtgaggagggtgtggaaggtttggggaaaggcagttgggcatgtccctgactctctatcccctccactttgatagcctcccttcgatggggaggacgaggaggagctgtttcaggccatcatggaacaaactgtcacctaccccaagtcgctttcccgggaagccgtggccatctgcaagggggtgagagccccctgactcccagcttctccaggctcacaaccacacaccccattgctgtctctgtgcctattagaaaaatgctcccattcctgaagtcactttacttccatctgttggaaaagttgatatgatgcataggttttgttagaacaatgatttccagccctgttgccacgaggcctggagatggcctctgtctcatccttctctgtgactcccactccccagctccctgcttgcaggaagtgctgaaagtccagggtgtctgtctgtctagaactgggtgggtcaggtaaacccaacttctgcagcttttcttcctgtgtgaacttgggtgagtcaccaaaactttgtgagcttaactctcttcaggggttatggagttgacacagaagaaagcacctggcccatagcagattttcagcccatgtcagcaccttctgcgtctagctgctctctctgcatctccctgacagtctctctggtttctgtctcatgcctcccctccatctgcatacgatggggctctctgtgtttcttccttttctctgtgtctccttctgcatctctgtctacacttttgggcctttgtccaacccccctaccccccatctctgtcccctcctgtgtccactctcatacacacacgctacatctcaccctcctctcctgctggctttctgtcctcccttttctctgggtctctgtccccatatttggtctttattcctccctctgggtgtgtgtttcctgggtctctatccttctctctttctgaatctctgtccccctgggtctcctctgtctcctcccttctctgagtttctgccttcttacctggggtctctgtaccaccctctgaatttctatttccccttttctctgggtctgcaacctctcttcccccattccctccctcttccccttcatctcctctacccttccctccctccccctaccgacctccctctgtccttcactctccccttccctccctccccctacccttccctctccccgtccctctctccccttccctctctccccctaccccttttccctctcctcttctccatctccctcatgatttgttctgtttctctgtgtgtccctgggtctctgggtatgaatttcatctgctatcattttcatgtatcctctccttcttcctgtctctctctctctctctctcactcactctcaccctctgtctctctctctctctgtccctcttcctctctctctcctctctgtctctctctgtctcgctctctgtctgtctccctcctcctcctcctccctcctcctcctcctcctcctcctcctcctcctcctcctcctccttcttcttcttcttcttcttcttcttcttcttcttttcttctctctctctctcctttcttttcccttcctccctccatttgcctgtttcccctggctgttcttatctctccggatctcatgcctgtgtctcttggttcctccatctgcctgtctctgtccctctttctctgggtctacctgtccggcactctgtctgtttgtctgtctgtctctctctgtgtttcccacagttcctgaccaagcacccagggaagcgcctgggctcagggcctgatggggaacctaccatccgtgcacatggctttttccgctggattgactgggagcggctggaacgattggagatcccgcctcctttcagaccccgcccggtcagtcaccctccaggcaacaaaaacctggtccctgaaggggtggggttcccctgggcctcaatatacctgtatgtgggggtggggttccctctgcagagccccccgcccccaacaaaaggaggtgcagacaccatgaagcatgaatagagattctgcaggagacaggagatgagactggggtacacagagggacacccgaggagccctcggagctgcttaactttccctcccccacgtctcccacagtgtggccgcagcggcgagaactttgacaagttcttcacgcgggcggcgccagcgctgacccctccagaccgcctagtcctggccagcatcgaccaggccgatttccagggcttcacctacgtgaaccccgacttcgtgcacccggatgcccgcagccccaccagcccagtgcctgtgcccgtcatgtaatctcacccgccgccactaggtgtccccaacgtcccctccgccgtgccggcggcagccccacttcacccccaacttcaccaccccctgtcccattctagatcctgcaccccagcattccagctctgcccccgcgggttctagacgcccctcccaagcgttcctggccttctgaactccatacagcctctacagccgtcccgcgttcaagacttgagcggagcccgatattctccctgaccttagcgttctggactctgccccaatcgggtccagagaccacaccactaaccatccccaactccatggggttcgagactccatcttggtagttctgtgcctccccccagaccccgcccctggggaaatagcctcacggggttggctgttccagactcaggttccagaacagccctcggcctccgaggctccccgcctccactctagttctagatgagtgggaggcgtgcccccctcctccagtacgtcccgctgctgtgctctggggatttctgggatatatggaggattctttccccagaggctcccaatcagcttttgttctagacttccccatcccgaagccatcacttctccccgcagcccgcctgccgtgcatggctcctgtctggctcggacccaccccaactctccccagtgcctgccactctctgggactctcctcctcccctcctcttcccttagcctctcccacccggccacagctgctggagaataaatttgggatgctgatgctgaagtgtttggatattttcttgtaagcttggagaatgaacggggtgtggaggcgggacagtgactgtacatagacacaaacagagaaggaaagcacggagacccacaaagtgagaggggagacacccactgcaggggagcaagcagagaagcgcgcgcagacagaggcaggagacccagacagacagagacagggagagaaaatatcacagagggcaccaacgtggacagtgcacagcgagagaggggcacggagatcactgagagtgccaggtggcgacccccgcgcagagacccagcgcgtccgtgttcaccagagcagccacgcaagctcacatgcacccccaggctcagacaccggggagaagtccttcccaagcggggagatcacagtctggcctcttcttgagagacctagagacctgatcagaggaagagacccccacgccagagcaaccaaaaacagccagaacccgagagcctaggaatcggcgacggaggcacacggcaggcagacgcgccttctgggcctctttcccttgacccacttgagagtctggggagtgccggggaccgtgcagatggactacatttccccgcaggcctcgcggcagacccttcccccaagtgcggctccttgccgccagggctgatgggaaatgtagtctccggtcagggccagaccagtggagcggtgtgccttgtctgtgtgtttggaggggactgagccccaaagcttcgcagtcttccttgcggacccgggcacgtcttcttccctgcagtctcctgggtttccatgacccggtccgggtggatgctggggctgcccctctctccctcatcaccgccgcgacacccccatccagtgcccgcaggccccagcccccgctccgaccctcggcgggcggcctgcccctttaagagtggccccgctgacatcacggcggggggggggggtggcccggctcctggctccgcggcggctgcaggacccgactccgctctgcgcccgcccgctgctgtagggaccccggcccgggacgccccctcccgcttcctgcagccgtccagaccccaggctccgccccaggcctggctagagccccagtcctcgtcaggggacccccaggattgtccctgctgtctctccttctcagagtctctctctgtctctctctgtctctctgtctctctctctctgcctctgtctctgtctcttctccaagctcaaggtctctgggtctcagcatctctcagccccaggcctctgggcgtccccctgtctctttctgtctcttcctggtctctgacctctccacttcccaggcctcagaatctctgcgcctaggtggtgaggggtggtcttaaactctgtctctctccctctttgtctctctctgtctctgtgtctccttcagtctccagacctgagtccctggatttctcggcctcaaggtctcggcgtgactttctctctctgccctgtctctctttgtgcctctgcccctctcgggctctctgcctctgtttctattctctctccctctctgcctcccccatcctcaaggcccatctccctccctcgctgcatccttccccccttccctccccgcccctcccctcctccgcagtagccaatgagcggccgccggttcctgctcccggctccgtccgccgagtgaggccgcggccgcggggggtggggggtgggaggccgggagggggccgggacgccgggctccggggcgggggcggggggcgcgggcaccggcgaccccggtggcggcggcggcggccgggggaagcctcggggccggtcatgcggctgcggggcccgcggcccggagcgtccgcccagccctgagcgaggtgagcgctagcggagggtcctgggaggaagaaggggcgcccctcgaggtggctgcgagccgggtttggggcaacaagggacccgagtggctccaggggtggtgagatcctggcggtcgggacgcccgaattcgagcggctatgggggatgcagggacacctgggcctggcgatcccggaggacggggtccgagggtcccggagtgggaaactgcactcctcgcgtccgagtcgcagcgagcgtgggctggggagggcagaggccgggtccctgaggaaggcgaggtacggggcgagggcggaggacccaggcccggccagagcaggatgtgggtctggaaaggggtcccagaaagggggagttacggtctcccgagagatggaggagagatggagtttgggcttaagacttgcagaaggggaccccggagattcaaatgcctgaatccgggaaagggtgggagaaagagggagaagaggaggcttcaggcctggggggagggtcccaaaggaggaaaggctggaggaataaggagatctgggcgggccagtgagagggaggaggaattggagcaaggttgggttttaaaacggggtgcgagaatgtggagaagggacgaggtcccagctgagagtcagaggggcgaaagggggaagctgagatcggctacctgggatggaggcagccagggtggccagggtgatggtgcccgtttccgagcccacagggctgcgaggggaccaggcagctcgcggtcaaacccctgagccgccaggcgggggatgggaggaaaagctggccagagcgttccctgactccggatctcggaggcctccaagaggttgggggggaaggaggggggatctggaggctgggagtgcggggtggagcggggaggagtgagggttgtctcagactccagagtctttattcaggtggagcagagttgcaaggttagaagaattctggtgaaggaaagtggagttttatgtcttgattagtttgtaggggagaatgttgaggggtctcaaccttcatagttaaaaagatcccgggtattcagggatgtagaggtctctggttgataaaggctaagggtcccaagttgagacccccaaatcacgggattgcgtggcttggggaaaaatcttgcaggggtcgggggagaatcgtgggtaaggaatttcaagtccttgagatctgggttgaggagctccctcgctggaatttctaggttcctaagtggaattggggaggccacagagatgaactgggatctcctgtttggagtctaatgttatgaaatcgggactccatgctggatgttgaagaagatctgtgattggaagtcccagcatgggaaaccggggtccagaacctctggtaggaagtttcagatcgtgtgttaggggagggggttttgggactcctgcttgagattttagagttcagggcactgaatcctagttggaaggatgagagaccgttgtttgactggggtgctctgatgaggatgctggattggtggtggtggtggggtccagctcattcatgatttttttttttgagatggagtctcactctgtcacccaggctgaagtgcaatggtgctatctcggctcactgcaaccttgcctctcaggttcaagctattctcctgcctcagcctcctgagtatctgggattataggtgtgagccaccgtgcccggctaatttttgtatttttagcagagacaaggtttcaccatgttggccaggctggtctcaaactcctgacctcaagtgatccacccacctcagcctcccaaagtgctgggattccaggtgtgagccacctcacccagtctcagctcctgattttgatgttctggaatctgtaatcgagattctggttctatgtctctgggttccaatgttctgggactcagcagactgtgaagatgttccaggattccaggtccaggagcctgcctagatctgggagggtggaattagggttctggagctaggttctggagtgaggaggaattggagcaagattgggttttaagacggggtgcaagaatgtggagaagggacgaggtcccagctgagagtcagaggggcgaaagggggaagctgagatcggctacctgggatggaggcagccagggtggccagggtgatggtgcccgtttccgaacccacagggctgcgagaggaccaggcagctcgcggtcaaacccctgagccgccaggcggaggatgggaggatgtcatgtgtgatgtcatcttaaattggggtatcaaatgaggtcaaggcacaggatcagagttagaaggtcatgggtcaagttcttggtgttagaattgggtgttaggctcaagatacaaatcttgagtgtaaacttcagtgggggcctctgctcaaagtcttagatagggctgaggtcaagggtgtgaagccctggtatggggttagagatccttggttagtgacccactttgggaatttctggatgtagttcagagacagggtgcaagaaaatgtatcagggcatcagattagggcatggagttaagactgggtagcctgggttagagtttctggccagctcaagttgtagagcatccagggttcaagcccaatgccctgtgctctgggatctaggtcctggctcagagttgaggttattgatccttgttggagtctggtgttcacaaccgggggcttcgatcgtcacacagagacagggctgcaggatgccaggtcctagagctgaaatcattgatctgcctaatagtttctgagtcactgatccacactcaaggttagggactctggtggcatctgatttctaaattagggtctcaggtcagcaggtgaggttaggttttggcagggggacctggttctggggttaagaagctcaaattagaatttctgctcggagtcacagtatttgggacccaggtccaaacacggttggagccaagattcaatctctgggcctgggctgaaagttgtgattagaaatctaattctggggttggggatctggatctggagctagaccacaggcagcaggtttggggagcccagccctgaggctgaggctcaacagttggtgtctctggtcagactctagggttggggtcatgggtcaggccacggaggtcagatctgagatttcgatttgggagtcagtgtctctggctagggcccagcatcccgggttgctgcatggggtcaagcactctggtcggtcccatggagctctgcactgtagcttcccttccacaggccccgcagggcgccccctgcctctgaggatgagtcactgcagcagccgcgccctgaccctgctgagcagcgtgtttggtgcgtgtggcctgctcctggtaggcatcgcggtcagcactgactactggctgtacatggaagaaggcacagtgctaccgcagaaccagaccaccgaggtcaagatggccctgcacgccggcctctggcgagtctgcttctttgcaggtacagccctcacccgtcttccactcaacagtttctgccttgcctggggtctgagagtcttagccatagtcccatcccttgagttccagaaatccagaaacggatcctgattctctcctggaagttcaaatttctacgtggagccccagtgactagccctttattcctggatctaggagccccaatgctccaggcccctaacccctaaggaattctggagccttcctttaaagtttgtagtctaggtttagaacttgtcccctgcacaatttcagtgctgaatgggcaagattaaaaaaaaaaaaatgcatgggacgggcgcggtggctcatgcctgtaatcccagcactttgggaggccaaggcaggagtatcccttgagctcaggagtttgagaccagcctggccgacatggtgaaaccccgtctctactaaaaatacaaaaattagctgtatgtggtggtgcacccctgtaatcccagctacttgggaggctgaggcaggagaatcacttgaacacgggaggtggaggttgcagtgagctgaaatcacaccactgccactgcgctccagcctaggagacagagtgagactccatctcactctccctagctctgactgctggcatgcacctgtagttccagttattcaggaggctgaggtgggaagattgcttgtgtccaggagttcgaggctgcagtgagctatgacggtgctgctgtactccaacctgggtgacagagcaaaacccagtctcttaaaaaaaaaaaaaaaaaaaaaaagaaaatctatacctcccagggaccacaaagaccaattcattgtaagaatcctggctccccagacctcgtcctctttagggaccacaagttctgatctacagcccctttgttgcttaagacctagagttccagccttgtcctccttcaagcaggagtctctagggcagttagaaagaggagttccaggccaggtgcaatggcttatgcctgtaatcccagcactttggggggccaaggcaggtggatcacaaggtcaggagtttgagaccagtctggccaacatggtgaaaccccgtctctactaaaaatacagaaattagccaggcatagtggcgcatgcctgtagtcccagctactcaggaggctgaggcaggagaatcacttgaacctgggaggtagaggttgtggtgagccgagatcgtgccactgcactccagcctgggcaacagagtgagactccatctcaaaaaaaaaaaaaagaaaaaaagaaaaagaaaagaaagaggaatcccagacagacatccacccacccgctttcccaacacccctggagtagtacagctcgtaacccttgggttaggccttgctcccccatcctggggtctcccctctatctgtcctgcccccacccccagcctctctagagcttaggagcctctcatccagccctgtctgtttctcttccccccaggtcgggagaaaggtcgctgtgtggcctcagaatattttcttgaaccggagatcaatttggtgacggaaaacacggagaatattctgagtgaggggatgtgggggcacctaggcacaagacagcaagatcacagccgagtcgtggagtcctgggagggggcaggactagggaaagggtggggtccaagggaaggaggggaggcttgaaagaaggcagaatgggccaggcatggtggctcacacctgtaatcccagcactttaggaggctgaggtgggtggatcacctgaggtcaggagttcgaaaccagcctggccaacatggtgaaaccttgtctctactaaaaattcaaaaattagctgggcgtggtggcgcgtgcctgtagtcccagctactcaggaggctgaggcaggagaatcgcttgaacctgggaggtggagcttgcagtgagccaagatttcaccactgcactccagcctgggcaactcacagagtgagactctgtctcaaaaaaaaaaataaataaaaggaaggaagaaagaaagaaggcaaggcagagtggtggttaggtaaggagaaagagcaaggttgaaggggtgaggtccggttggtgaggagcggtcaatcagaaagggggcggagttaagcccaaggaggtgtggcctgtgtgagggggcgtggcaggcttgtgtctgccgaggaaatatcaggggaaggagaagagtcagtggggaaggggaggagtcagtaaggaaagggaggagccaaacaaaaacgcagaggtggtgagagcagaggtcaaggaatggggaagtgtcccactggagattcccccctcacccctgtctctccccatcccctccccagagacagtgcgcacggccacccccttccccatggtcagcctcttcctcgtgttcacggccttcgtcatcagcaacatcggccacatccgcccgcagaggaccattctggcttttgtctctggcatcttcttcatactatcgggtgagcctaaggacttgggggttgggggggaccatttccagttccagggacctgtggttccttttccacttagccacttccttgctgtgtggcctgggaggaggtgcagaccctctctgagccccactttccttctatgtgcaatggaaatagcagtgcccattgcaaagcgtccttcagaggaccacattatagcgagggcttactgggtgctaattaggtaccaggctctattctcacactcgcaacaaccttgtgaggtaaatcctattaatagcccattttacagatatggaaacagacactcagagggatgaagtcatttgcttagggccatacaactagtgagaggtagagctgggaatgaaactcacgcaattcgcctccggaggctgtatttttaaccactgctgataaactgcaattaacagtttacaaggctgcttattttctgtgcaatattttgttttaaattttttcaaataaatggaaaagtccaaagaactgtatagggaacacccatgtagccaccacttagagtcaaccattgacaggtcactagacttgcatggtcttgcgtctgtccatctgtctatatgtccaaccatccatcaatccaccttattgtctagatgcatttcagagtaagtttcaggcatcactacacttcaccctacttacgtcatcgtacacgtgattagctagagttcaatatttgtttacagtttttttttccttcttttgaggcacaagcctcttttgcatatgtgatctcacacccgtctcctaacatcgctacccaggagttattattagcactcacttgataacatgggggtaccaaggcccagaattgcatagagagttgcccataagtaccaaggcccagaattgcatagagagttgcccaagatactagtgtaaactatttccagaggacttcagtgtccagagttccagcaatgccttttttctttctttcttttttttttttttttttttgactgagttttgctcttgttgcccaggctggagtacaatggcacgatctcagctcaccacaacctctgcctcccgggttcagacaattctcctgcctcagcctcccaagtagctgggattacaggcatgtgccactacgcccggctaattttctatttttttttttttttttaatagagacggggtttcttcatgttcgtcaggctggtttcaaactcccgaccgcaggtgatctgcccacctcggcctcccaaagtgctgggattacaggtgtgagcccctgcgcctggctttttttttttttttttgagacggagtctccctctgttgcccaggctggagcccactggcgtgatctcggcccattgcaacctctgcctcccgggttcaagcgattctcctgtctcaccttcccgaatagctgggattacaggtgtgtgccaccatgcccagctaatttttgtatttttagtagagatggggttttgccatgttggccaggctggtcttgaactcctggcctcaagtgatcctcctgccttagcctcccgaagtgctgggattacaggcatgagccactgtgcctggcctaaagcttttttcttgagtgttactctcctccaaatttcaactcagtccaatccaattcagtccaattcagctaaaatcagcccaaatcaactcagctcgagtacatttaactccatccatccaacccagctaaccccaattcattctgactcaattcttcagttcatttcaaatgaattcaacataatttaattaaactcaaatcaggttcttgtaattcagttgatagtttatgaacaaaccccactgcatgtctcagctccattctgtcccctggggccggcactcagctccctcttttcagtggctgtgcaaatcgttgaaaagggatcctccaactaagcaactaagatccaaagcacctgatccaatatcctctcctccagtctctgctcctcacccaggctcctcttggtgcaacctcccccatgccttcaacctaacctgaagagaccttttccagggaaagcagggtgcaacctccgtgcaaacttgaatcacagcgggtggagcccagacactgagctaaaataagacacggagaatatcacgatcctagagtgtgagagcggaaaggtctcatcatttttcaaatggaaaaatagtagcctagagacaaaaagtggggcaagagtagatagcatggggatttttattcaacctgtcaaaatcatgataaggaaagtcccattgtttgcggttcacaggaatggaaacagaggctcgaagaggcgacatagcttgtcaatggcagaactggattggaatctagggtattctgattcctaaatccatgcttataccacccactgcaccaggaactgactgcccaaggtcatgctgaggatcagtggtgcaggcaggctggaagtcacgtctctagggtaacaatagagtaattcggaagagattgaatccaactgcctgaattccttcctagcattcatttcacaggctatgacctatgcactccaccccaaggtatccaggcatgtgctgccaagcttggggtgtatagtggctgaaggccacatgttgtaaacctaggaagaattgggttcaaatcttgcctctaccacttacggtttgaaccaaagccttcttttgtggagttattgaggggacaaatcttgatcagtggttggcaagctttttctgcttagggccagatagcaaatattttaggctacgtgagccataggttctccgatgcaactattcaactctactgggatgcaacttggccactgtagtacaaaagctgccaggtgtaagcaaatgggagtggctatgttccagtgactatttgtggactctcaaatttgagttcaatgtaattttcatgtgcatgaaatattcttcttcttttgatttttttttaaatcaaaagaagaataataggtaaaaatcctgcttagctcacaaaccatacaaaagcaggcaatgggccaggtcatcatttgccaacccctcatttagatcatgaatgtaaagcatccgacccactgcctggactgtaacagtaagcactgaacacttgttgttttaagtaaataaataaatgtagtaatgatagtagtactagcggtggtggtgctggtgctggtgatagtagcagtagtagcagtacgagtagtaacaaacaatttttgaatttttattttacttttttattttttatttttttgagatggagtttcgctctcgtcgcccaggctggagtgcaatggcgcgatctcggctcactgcaacctccgcgtcccaggttcaagcgattctcctgcctcagcctcccgagtagctgggattacaggcatgtgccagtgcacccggctaattttttgtatttttagtagagacggggtttcactgtgttagccaggatggtcttgaactctcgacctcaggtgatccgcccgcctcggcctcccgaagtgctggaattgcaggcgtgagccaccgcacgttgcccttattttgattttttaatttttctccccttctggccaaatttcaaattttcccaacccagcctcctcaccatggcattatgctgccccaccaagattaagatcacaaaaaagaaggagatttaaaaggagaagttaaggacagaaatagtaccaatgccttgggacttggaatggaatagcctggggtgactgcctcctgttcgcaatgaggaaaccaggcctcagagagagaaagacagggattgccccagacctggtcattggtggagttgcccaggtctggtcattggtggagttgtcccaggtctggtcattggtggagttgtccccaggcctggtcattggtggacttgccccaggctggtcattggtggagttgccccaggctggtcattggtggacttgccccaggtctggtcattggtggagttgtccccaggcctggtattggtggagttgcctcaggtctggtcattggtggagttgccccaggctggtcattggtggacttgccccaggctggtcattggtggagttgccccaggctggtcattggtggacttgccccaggctggtcattggtggagttgtccccaggcctggtattggtggagttgccccaggtctggtcattggtggagttgccccaggctggtcattggtggagttgcccaggtctggtattggtggagttgccccaggctggtcattggtggacttgccccaggcccggtattggtggagttgccccaggtctggtcattggtggagttgccccaggctggtcattggtggacttgccccaggctggtcattggtggacttgccccaggctggtcattggtggagttgtccccaggcctggtattggtggagttgccccaggtctggtcattggtggagttgtccccaggcctggtattggtggagttgccccaggtctggtcattggtggacttgccccaggctggtcattggtggacttgccccaggctggtcattggtggagttgccccaggctggtcattggtggagttgccccaggcctggtcattggtggacttgccccaggtctggtcattggtggagttgtccccaggcctggtattggtggagttgccccaggtctggtcattggtggagttgccccaggctggtcattggtggacttgccccaggctggtcattggtggagttgtccccaggcctggtattggtggagttgccccaggtctggtcattggtggagttgccccaggtctggtcattggtggagtttccccaggtctggtcattggtggagttgcctcaggtctggtcattggtggacttgccccaggtctggtcattggtggacttgccccaggccggtcattggtggagtcgtccccaggtctggtcattggtggagttgccccaggtctggtcattggtggagttgccccaggctggtcattggtggagttgccccaggctggtcattggtggagttgtccccaggcctggtcattggtggagttgccccaggtctggtattggtggagttgccccaggtctggtcattggtggagttgccccaggctggtcattggtggagttgccccaggtctggtcattggtggacttgctccaggtctggtcattggtggagctgtcccaggctggtcattggtggagttgccccaggtctggtcattggtggagttgccccaggctggtcattggtggacttgccccaggctggtcattggtggagttgtccccaggcctggtattggtggagttgccccaggtctggtcattggtggagttgtcccaggtctggtcattggtggagttgtccccaggtctggtcattggtggacttgccccaggctggtcattggtggacttgccccaggctggtcattggtggagttgccccaggctggtcattggtggagttgccccaggctggtcattggtggagttgccccaggcctggtcattggtggacttgccccaggtctggtcattggtggagttgtccccaggcctggtattggtggagttgccccaggtctggtcattggtggagttgccccaggctggtcattggtggacttgccccaggctggtcattggtggagttgtccccaggcctggtattggtggagttgccccaggtctggtcattggtggagttgccccaggtctggtcattggtggagttgcctcaggtctggtcattggtggacttgccccaggtctggtcattggtggacttgccccaggctggtcattggtggagtcgtccccaggtctggtcattggtggagttgccccaggtctggtcattggtggagttgccccaggctggtcattggtggagttgccccaggtctggtattgctggagttgtccccaggcctggtcattggtggagttgccccaggtctggtattggtggagttgccccaggtctggtcattggtggagttgccccaggctggtcattggtggagttgccccaggtctggtcattggtggagtcgtccccaggtctggtcattggtggagtcgtccccaggtctggtcattggtggacttgccccaggtctggtcattggtggacttgccccaggtctggtcattggtggagctgtcccaggctggtcattggtggagttgccccaggtctggtattggtggagttgtcccaggtctggtcattggtggagttgtccccaggtctggtcattggtggagttgccccaggtctggtcattggtggagttgtcccaggctggtcattggtggagttgtcccaggctggtcattggtggagttgtccccaggtctggtattggtggagttgtccccaggtctggtcattggtggagttgccccaggcctggtcattggtggagttgccccaggcctggtcattggtggagttgtccccaggtctggtcattggtggagttgtccccaggcctggtattggtggagttgccccaggtctggtattggtggagttgtccccaggcctggtcattggtggagttgccccaggcctggtcattggtggagttgtccccaggtctggtcattggtggagttgtcccaggctggtcattggtggagttgccccaggtctggtattggtggagttgtccccaggtctggtcattggtggagttgtccccaggtctggtcattggtgcagttgccccaggtctggtattggtggagttgtccccaggtctggtcattggtggagttgtccccaggcctggtcattggtggagttgtccccaggcctggtcattggtggagttgtccccaggcctggtcattggtggagttgtcccaggtctggtcattggtggagttgtcccaggctggtcattggtggagttgccccaggtctggtcattggtggagttgtcccaggtctggtcattggtggagttgtcccaggctggtcattggtggagttgccccaggtctggtcattggtggagttgtcccaggactggtcattggtgcagttgtcccaggcctggtcattggtgcagttgtccccaggcctggtcattggtgcagttgtcccaggctggtcattggtggagttgccccaggtctggtcattggtggagttgccccaggtctggtcattggtggagttgtcccaggtctggtcattggtggggttgtcccaggctcgtcattggtggagttgccccaggtctggtcattggtggagttgtcccaggtctggtcattggtgcagttgccccaggtctggtcattggtggagttgactcaggctggtcattggtggagttgccccaggcctggtcattggtggagttgtcccaggtctggtcattggtggagttgccccaggtctggtcattggtggagttgtcccaggactggtcattggtgcagttgccccaggcctggtcattggtgcagttgtcccaggcctggtcattggtgcagttgtccccaggcctggtcattggtggagttgtcccaggctggtcattggtggagttgccccaggtctggtcattggtggagttgccccaggtctggtcattggtggagttgtcccaggtctggtcattggtggggttgtcccaggctcgtcattggtggagttgccccaggtctggtcattggtggagttgtcccaggtctggtcattggtgcagttgccccaggtctggtcattggtggagttgactcaggctggtcattggtggagttgccccaggcctggtcattggtggagttgccccaggtctggtcattggtggagttgtccccaggtctggtattggtggagttgtccccaggtctggtattggtggagttgtccccaggcctggtcattggtggagttgtcccaggtctggtcattggtggagttgtcccaggctggtcattggtggagttgccccaggtctggtcattggtggagttgtcccaggtctggtcattggtggagttgtcccaggctggtcattggtggagttgccccaggtctggtcattggtggagttgtcccaggtctggtcattggtgcagttgccccaggtctggtcattggtggagttgtcccaggcctggtcattggtggagttgtcccaggtctggtcattggtggagttgccccaggtctggtcattggtggagttgccccaggtctggtcattggtgcagttgccccaggtctggtcattggtggagttgccccaggtctggtcattggtggagttgccccaggcctggtcattggtggagttgccccaggcctggtcattggtggagttgccccaggtctggtcattggtggagttgtccccaggtctggtattggtggagttgtccccaggtctggtattggtggagttgtccccaggcctggtcattggtggagttgtccccaggcctggtcattggtggagttgccccaggcctggtcattggtggagttgtccccaggtctggtcattggtggagttgtccccaggtctgggtattggtggacttgccccaggtctggttattggtggacttgccccaggtctggtcattggtggagttggtcccaggtctggtcattggtggagttgtcccaggtctggtcattggtgcagttgccccaggtctggtcattggtggagttgccccaggtctggtcattggtggactttccccaggtctggtcattggtggagttgccccaggcctggtcattggtggacttgccgcaggtctggtcattggtggagttgtccccaggtctggtcattggtggagttgtccccaggcctggtcattggtggagttgccccaggtctggtcattggtggagttgtcccaggtctggtcattggtggagttgtccgaggtctggtattggtggagttgtccccaggcctggttattggtggagttgccccaggtctggtattggtggagttgtccgaggtctggtattggtggagttgccccaggctggtcattggtggagttgcccaggctggtcattggtggacttgccccaggctggtcattggtggagttgtccgaggtctggtattggtggagttgccccaggtctggtattggtggagttgccccagttctggtattggtggagttgccccaggtctggtcattggtggacttgcctagggctggtcattggtggacttgcctagtgctggtcattggtggacttgccccaggtctggtcattggtggagttgccccaggtctggtcattggtggacttgccccaggctggtcattggtgtacttgccccaggtctggtcattggtggagttgccccaggtctggtcattggtggagttgtcccaggctggtgattggtggtgttgtccgaggtctggtattggtggagttgccccaggtctggtattggtggacttgcctagggctggtcattggtggacttgccccaggtctggtcattggtggagttgccccaggtctggtcattggtggacttgcctagggctggtcattggtggacttgcctagggctggtcattggtggacttgccccaggtctggtcattggtgaagttgccccaggtctggtcattggtggacttgccccaggctggtcattggcggacttgccccaggtctggtcattggtggagttgccccaggtctggtcattggtggagttgtcccaggtctggtcattggtggagttgtccccaggcctggtcattggtggagttgccccaggtctggtattggtggagttgccccaggtctggtattggtggagttgccccaggtctggtcattggtggagttgtcccaggctggtcattggtggacttgccacaggtatggccattggtggagttgccccaggctggtcattggtggacttgccccaggctggtcattggtggagttgtcccaggctggtcattggtggacttgccccaggtctggtcattggtggacttgccccaggctggtcattgggggagttgccccaggtctggtattggtggagttggcattcaattgtggagaaaccagtggaagggctcaggcaggaggattacggtcacagctgcgcattaaatgtctcacagggacctctgctggggatggactagagggaaagagactggaaatgtacaaactgaggatgcttgtgtagtggcccaggccgtagcagataaggtctgtgctggggctggagatgtgaggaaaaggcaattggatggccatgtgagagagggatattgatggaagaatcaatagaatcagatgactgactggatgtggttggtagaagtgggaggaagctagacgggcattggtttttttccaggtcataagaggcatgtgcatgcctgtcccacattagcccctgatcattaaacatgatctgtggatatgcttattcattcaatcttcagatgtcctgtataccaggccctgtccttggcacagaaaacacaattaaatctcatgtgtagcccatgtgcactcactcacagaacagctcccgactacctgtcagtcaaagcttttcacactttttcttaaatcccttcaatagatccccattacacttagaatacacccaaatgcctcagtctgtcctccaacgtcttctatgatttggctactgctcagatctctgacctcatctcctcacccactagcactctccgcattgcttgtaacttcagccacactggcctcattcttctccttgaaaatgctaatcacagcctcacctcaggacttcgtacactcattattcctccctgcttggaagtcctttccccacctccaactccacccgaccctaattctcagaagcctcaaactttttctcttcagagttgctttctctgacaacagtacctagtattcccttaccctggcgatactatcacatgctttatttcatattttttcatagcatttattgctactgttgtgccatttgttttttgtcttcttgtatcagaatgtaatcttcaaaagggctgggacaggccaggtgcggtggctcatgcctgtaagcccagcactttgagaggccaaggtgggtggatcacttgaggtcaggagttcgagaccagcctggccaacatggtgaaaccctatctccactaaaaatagaaaaattgactgggcatggtggtgggcccctatagtcccagctacttgggaggctgaggcaggagaatcacttgaacctggaaggtgaaggctgcactaagccaagatcatgccactgcactctagcttggtcgacagaacaagactctgtctcagaaaaaagaagagtgagggggatgctgagaccttttctttcctttttctttttttctttttttttgagacagagtcttgctttgtcacccaggctggagtacagtggcgtgatctcctgccttagcctcccatgtagctgggattacaggcacctgccaccacgcctggctaatttttgtatttttagtagagacgggattccaccatgttggccaggctggtctcaaacccctgacctcaagtgatccacccaccttggcctcccaaagttccgggattacaggcgtgagccactgcggcgcagctgggctgagaccttttcaaacatgttcttgtttgtatcttagagcctagaggtgttgtttgtatgaagtgcaaactgaaatatttccagaatgagtgagggcagaagggatgagtgacagtcttgcatattctaagaaaagggaagatgcattaacctgacatagtagggtgctctggagagggtgagagagaccagggagggctcccaggaaaaggtgacagctaagttgatgccgaaagggtcagggggaaattttcaagtccagaaagaaaagagcctggtttggagatgggattcacagcatgcgataaggtcctagaaaggagctaggacaggccagccatggtggctcacgcctgtaatcccagcacattgggaggccgaggcaggcaggtcacctgaggttaggagttcgagaccagactagccaacatggtgaaaccccgtctctattaaaaacacaaaaattagccaggcctggtggcaggcgcctgtaatcccagctactcaggaggctgaggcaggagaatcgcttgaacccgggaggcggaggttgcagtgagccgagatcgcaccattgcactccagcttgggcaacaagagcgaaactccatctcaaaaaaaaaaaaaaaggaaagaaaaaaagaaggcagctaagacagaggtcgacgccagtgcacctgtccatggtcctgaaacccagttgctctcaagtcaggatggttctattcagcttggaatgtaggtgactcttgcctactgtgctttaagaattacaaagcagatgtagttgagggggtgggaggagagtaagagagttggattgcagagatagaaaggaggaagggaggggagaaaaagagaaagggaaaataaggttatttttggagaaccagggctaatgcaaaatggccagaaagaaaaagcaacgataagaatgacttactacaaagaaaaaagaaaacaaaatctcttcctcggtggaaatatttctttctttctcatcagaccctggtcctgattctgcttatggagattggtatttatttatttatttatttacttattgaggcagtgtcttgctctgttgcccaggctggagtgcaatggtgcaatgtcggctcactgctacctttacctcttcggttcaagcaattctcatgcctcagcctcctgagtagctgggattacaaacgtgcaccaccatgcctggctaatttttttttgtatttttgtagagacggggtttcaccatgttggccaggctggtctcgaactcctgacctcaagtgatctgcccacctcagcctcccaaagtgctgagattacaggcatgagccaccgcacctggcagaatgtttgttatttagagctgtaatgtgaaacttggaccttaagtctggggttggagtgaactatgaggcaggtgttgtcagcaggaaccagatcacagacagcctggaacgacaggctgacttgtttctcctgtggacaatgaggagccaaggaagagttctgagcctggagggatagagtctgctttgggtttcagaaacggagatgaggattttggaacaatggtacaaacatacagaataaggcctgaaggccgggcacggtagctcacgcctgtaatcccagcactttgggaggctgaggttggcggatcacgaagtcaggggttcgagaccagcctggccaacatggtgaaaccccatctctactaaaaatacaaaaattagccgggcatggtggcgcacgtctgtaatctcagctactcaggaggctgaggcaggagaatcacttgaacccgggaggcagaggttgcagtgagctgagatggcgccattacaccactccaacctgggtgacacagtgagactccacctcaaaaaaaaaacaaaaaaaaaaaaaaaagagagaataaggcctgagctggggcaagggacttggggaagcaaaaagggggttagatttatgaggaattcaggaagtaaagcagacataatttgattgtccttcagtgaccatccctgatggatgagagagagagagggagagagagagaggaaaagaggagtgaagctgattcccctgcatctgagttaggcactgcagtgaatgtgatttttgggcttccttcaatcttcctttgctataaacctgctcatatttcaagaccaatctcaggtgcattttcaccatgtaatgcttcatgatcattctctttatttttgtattttttaattttttgagatggagtctcgctctgtcgcccaggctggagtgcagcagcataatctcagctcaccgcaacctccacctcccaggttcaagcgattctcctgtctcagcctcccgagtagctgggattacaggcgcccgccaccatgcctggctaatttttgtatttttagtagacagagggtttcaccatgttggccaggctggtctcaagtgatctgccctccttggcctcccaaagtgctgggattccaggcctgaaccaccacgcccagcctataatcactcccttactgcgtctcaacattatggaatactagaagttgaaagtgttatggaagttcagagcaagggaaaagttaattcttggaagggatagaggaatggtgggatttagagtgaatgggcttttctagatgttccagctgcatagcaagtatgttcttcatccattcaaagagaattgactacttgatggagaataataaaaaacaaggtggacttgtttctagcatcatggagttcctagcatctaactggggatggaggagatgtctaataaaaaagtaacaaatagataatataatgttagatggtgctacatgctacaaaaaaaaaaaaaaaaaaagcaggttaggaggagagtgatggggaggggttattatattatcccacccacctgaataatccaaggtttttaaatgtttttctctctatctctctatctttccctcctacctcaccatttttttttttttcttgagacagagtctcactctgtcacccaggctggagtgcaatggtgccatctctgctcactgcaacctctgccccctgggttcaagcaattcttctgcctcagcctcccgaatagctaggactacaggcgggcaccactacgccaggctaatttttttttaaatttgagacggagtctcactcttttgcccaggctggagtgcagtggctcaatctcaactcattgcaacctccacctcccaggtacacaagattctcctgcctcagcctcccgagtagctgggattgcaggtgcctgccaccacgctctgctaatttttctgtatttttagtagagacggggtttcactgtgttagccaggatggtcttgaactcctgacctcatgatctgcccacctaggcctcccaaagtgctgggattacaggcctgagccaccgcactgggccaatttttgtatttttagtagagatggtgtttcaccatgttggccaggctggtcttgaactcctgacctcaggtgatctgccctcagcctcccaaagtgttgggattataggtgtgagccactgtgcccggccccacctcactttttaaacacaccacacacagattttttttggctttagcatttgaaagtaaattgcatacatgttgatagttcatctctaaaattaagtgttagtatgcatcctttaaggctaagggtcgggtgctgtggcctcactttgggaggccgaggtgggcacattacttgagctcaggagttcaaaaccagcctgggcaacatggtaaaatcccgtctctccaaaaattaccaaaagtcagccaggcatggggcatgcacctgcagtcccagctactcaggagggtgagctgggaggatggcttgagcccaggaggcagaggtcgccataagctgagatcgtgccactacacttcagcctgggcaacagagccagatcttgtctctaaataaataaataaatagaagaataatacattcgtctacgtaactacaacaacattatcagacatggacgttttataattccataatacaatttaatacatttttaaactgtcctggctatttcaagaatgtcttttataactctttccctagaaccaggattcattctaggtccatgcatgacatttagttaataagtctcttttttggctgggcgcagtggctcatgcctataatcccagcactttgggaggccgagctgggcagaccatttgaggtcaggtgtttgagaccagcctgaccaacatggtgaaaccccatctctattaaaatacaaaaaagttagccaggtgtggtggtgcatgcctgtagtcccagctactcaggaagctgaggcaggagaatcgcttgaactcaggaggtggaggttgcagtgagctgagatcacaccactgcatccagcctaggtgacagagtaagactctgtctaaaaaaaaaaaaaaaaaaaaaaagaaaggaaaaaaagcctaattccactactatttgtttttaacaacgctgacttttttttttttttttttttgagatggagtctggctctgtcgcccaggttggagtgcagtggcacgatctcggctcactgcaagctccgcctcccaggtttgcgccattttcctgcctcagcctcccgagtagctgggactacaggcggccaccaccacgcccggctaattttttctatttttagtagagatggagtttcaccatgttagccaggatggtctcgatctcctgacctcgtgatccgcctgcctcagccttccaaagtgctgggattacaggcgtgagccactgtgcccggccagcactgactttttaaatatatctcattattaaaatataaaaagaagccaagcacagtgactcgagcctgtagtattagctactctggaggctgaggtggaagaatcgctttgaacccaggagatggaggctgcagtgagctatgatggtaccactgcactccagcctgggcaacagagtaaggccctgtctaaaaaaaaaaaaaaaaaaaagaattaaaaaataaaataaaatatagaaagaatagtataatgaaattcatggatcctgcactcagtttcaacaattaccaacatatggcaaatctgtttttagtcatattgccatgtcctcttctgcatttcactacattattttaaagccagtctcagacatcatttgattcacagatatttcagtatatctctgagttataagtagtcttttatttactataaccacaatcccatgatcaagcccaagcaactaagaataattacttaatattatctcatatctagttaatgctcactcttccccattggcctcataaatgcctctttctagttcatttgttgcaaatccagatccaagttccacatgtacattgagttgatagatctctgaagcctctttcaacctaaaacggtccctctcctatttttttctggccatttatttttttgagaaatttgcatttttgttatgtggaattcccacattgcagttttccaatggaatcttctgttgtcgtttaatatgttcatctatttcagtgttttcttttctctctcctttttttttttttttttgagactgagttccgctcttgtcgtccaggcactgcaacctccgcctcccaggttaaagcgattctctggcctcagcctcccgagtaactgggattacaggcatctgccatcacgcccggctaattttgtattttaatagagatggggtttcgccatgttggccaggctggtctcaaactcctgacctcaggtgatccgcccgcattggcctcccaaagtgctgggattacagcactttgtgcgtgagccactgagcccagccttttctttttttgagacagagtctcactctgtcacccaggctggagtgcagtggtgcaatctcggctcactgcaacctccacctcctgggttctgcaacctccacctcctgggttcaagtgattctccagcctcagcctcctgagtagctgggattacaggtgcccgccaccacgcctggccaatttttttttttttttttttttgagatggactctcgctctgtcaccaggctggagtgcagtggtgcggtctcggctcgctgcaacctctgcctcccaggttcatgcaattctcctgcctcagcctcctgagtagctgggactataggcgcccaacaccacacctggctaatttttgtatttttagtagagagggggtttcaccatgttttggacaggctggtctcaaactcctgacctcaggtgatccacccgcctcagcctcccagagtgctgagattacaggtgtgagccaccacactcagcctattcctgtgttttcttgtaagccaagatctaaaagaagcttagatggatgcaggtttgatttttttttttttttggcaagaacactttatacataggtggtgctattcacatcctgctgtgtctattacatcaagagacacagattgtctgattgtctctctttttgagatattagagttgatcactggtttgagtgtcattagcttgctccatgtcatcgtttttctgaagactgagggacagggtatcctggtgaatgtcctgcatcttgggtttattgtttaatttttatttatttatttatttatttttgatacagagtctcgctttgtcacccaggctggagtgcaatggcgcaatctcagctcattgcaacctccatctcccgggttcaaacaattctcgtgcctcagcctcccaagtagctgggattacaggcctgcaccaccacgcccggctaattttgtatttttagtagagacagggtttctccatgttagtcaggctggtctcaaactcctgacctcaggtgatacacccacctcagcctcccaaagtgctgggatgacaggcgtgagccactgctcccagctgcatcttgaatttatttgtttcttcatggtaacacttcatttgttcctctttccttgtattttctgtaacctggaagttctgtctagactagaggcttgataacattcacgttaaacatcattggcaagaaaagtcagaggtgccgctgcatactttgtatcacgttactccagggagcaaataatgtcaggttgtcccacagtgagtggtaccagcttgaacccttggtaaagatggtgtccatcagagctccccatggaaaaggtaggtttttctttttacaatgaaaaagcaaggccaggcacagtggctcatgcctgtaatcctagcagtttgggattccgaggcgagaggattgcttgagcctaagagtttgagaccagcgtggtcaacattgagaccctgtctcttaaaaaaaaaaaaaaattagccaggtgtggtggcgcatgcctgttgtcccagctactccagaggctgagacaggaggatcacttgagcccaggagtttgaggctgcagtgagccatgatcatgccattgcactccagcccgggccatagagcgagaccccatctcaatagataaataagtaaatgaaatactagtgtgcaggtaatactttagcattttgaaaaaaaaaaatcttggtttgggatactcgtattttacattttttattttggagaaaatttaagactacaggacgcttgtaaaaataatacaatgaactctcatatccttcacctagcccagtttttcaacattttacaacatttgcctttctgtctctctctctctccatatatatatatagatctatatacacatatatgtatacacatattacatatacatatatacctatgtatacacacgttatatatacatatatacacacaaatatatgcatatgtgtgcacaaaaaatatatatgtacacacattggtgcaaccacttgaatataagttgcaaacacttcactagttcagcaagtatttcctaagaacaagggcattcttttacctaaccacagtacaataatcaaattcaggaagtttaaggtctataaaatactatagctaatatctagtcctacatttaaatttcaccaatgtcccaatactgtctttttttttttttttaattgagacagtcttgctttgtcacccaggctggagtgcagtggctcaatcttggttcactgcaacctctgccttctgggttacagggattcttgtgcctcagcctcccaaatagctggaactacaggctaatgccaccacgcctggctaatttttgtgtttttagtagagacaaggtttcaccatgtgggtcaggctggtctcaaactcctaagctcaagtgatccactcacctcagcctcccaaactactgggattataggcgtgagccaccgcccccaccctccaatactgtctttttttttttttttttttttttgagttggagttttgctcttgtacccaggctggagtgcaatggcgcgatctcggctcactgcaaccttctgcctcctgggttcaagcgattctcctgcctcagcctcccaagtagctgggattacaggcacccaccaccatgcccagctaatttttgtatttttagtagagacaggatttctccatgttggccaggctgatctcgaactcctgacctcaagtgatccacctgccttggcctcccaaagtgctgggattataggcgtgaaccaccacgcctggcctaatgctatctttttactgttactttttcctgattcagaatccaatctaagatcacgctttgcatttccctattgtgtctctttagtctcctttcatttttttttttttttaatacgtggaggatgccatgtgaacctttcattttttatggagctctgctgcctttttttttctttttcaatctttcatgttgacgtttttgaagagtgcagccagttgggctgtagagtgtcccactgtcctcatgagtggattcaggttacgcattctcagcaggaacacgacataaaggagggagtggtttgctcagctctcttctctggaggcccgtggtgtaggtctgccctgttgctggtgatgttaactgcgatcacttggttaaggcagtatctgccaggttctttcaccataaaggaagctttttatctctgtaataattaatagatcttctgtggggagattctgtcatccagcaatcgagcatcccctcgtgactcttgcctgaatctaacattactactaggattgcagaatggtgttttcttctaactctattattccacctacatggataaattggtgtgctactgaaaagaactttctcttttttcttattttaaatatgtatcagtgtggactcatgtattttattctattttgtttttaatttagtttttgtttttttgagacggagtctcactctgtcgcccaggctggattgcagtggtgggatctcggctcactgcaacctctgcctcctgggttcaagcaattcttgtgcttcagcctcccaggtagctgggattacaggcacccaccaccatgcctggctaatttttgtatttttagtagagatcaggtttcaccatgttggccaggctggtctcaaactcctgaccttaagtgatctgcccaccttggcctcccaaaatgcagagattataggcatgagccaccgtgcccagcctaacttaattgagttttttgagacagtctccctctgtcacccaggcgggagtgcagtggtgcagtcatagctcactgcagccttgaactcctaggctcgagggatcctccctcctgagcctcccaagtagctaagacaacaggaactaattatttatttttagtagagatggggtctcactatgttgtccaggctggtcttgagctgctgacctcaagtgatctgcccacctcggcctcccgaggtgcggagattccactcatgagccacggtgcccagcctccattatttttcaacggcaagtcatgctgcgataaatcagcctgtgcatgtgtggtttcccatcacgggagagatatcctcaggataaattcctggaagtgggattgctgggttaaaggacagatccgtgtgtgattttgttagatgctactaaatcccctttcacgtggcggcaccgttttgcattcccaccagcaatgtagaagaacgtccattctctcagcctccccaaaagagtgtgctgtgaagcttttaaacttctgactacccggttgatgagaagtggtagctcatcatatttttcatttgcatttctcaaattttgagtgagggaaatctacttttttcaacagggagatcataaaagtctcctccccccttcccttccctcccctcccctcccctcccctcccctccttctcggagttttgctcttgttgcccaggctggagtgcagtggcacgatcttgactcattgcaacctctgcttcctgggttcaagtaatcctcctgcctcagcatcccgagtagctggggttacgagtgtgtgccatcgcacccagctaatttttgtatttttagtagagacgaggtttcaccacggtggccaggctggtctgaaacccctggtctcaagtgatcctttcacctgggcctcccaaagtgctgggattacaggcttaagccactgcgcctggcccatagaaggtctttctaaagaggcaacaagtgaggagagatctaagtgacagaaatagacatggggaaatctgggggaagagcattccaggtagaaggaatggcaagaccaaaggccctgaggcagaagtgagcttgaggagttcaaggaagagcaagaaagttaggtgttctaggccgagtgtggtggctcacgcttgtaatcccagcactttgggaggccaaggtggaagaactgcttgagctcaggagttcgagaccagcctgggcaacatggggagaccctgtctctacaaaaaaatgcaaaagttagccccgcatggtggtgcatgcctgttgtcccagctactcatgagtctgaggtgtgaggattgcttgagccagggaggtggaggctgcagtgagctatgattgcaccaatgcactcctgcctggacaacagagcaagaccctgtcccaaaaagaaaaaaagtaaagaaagttaggtggtctaagaaaaagaaacaaggagaaactgatcagagatggtgtgggcaggtaccggaccatttatatactgcagtctaagaggtcagcgaagttttctgtaaagagccaaataataaataccttcagctttattggccacccagtctctcttgtaactgctcagccttgtggttgtagcaaaaaaccagtcacaggcaatatgtaaacaaatgggtgtggctgtgttccactatcatttgtagaaaccaaaatttaaaattaatgtactttaaaaagttgagatataaagccaggcacagtggctcacgcctgtaatcccagcactctgggagatgaggtgtgcagatcacttgagatcaggagttcgagaccagcctgggcaacatggcaaaaccctgtctctgcaaaaaatacaaaaaattagccgggcgtggtggtgtgcacctgtagtcccagctactagggaggctgaggtgggaggatcacttgagcctgggaagtgaaggctgcagtgagccatgattgtcccagtgctctccagcctgggtgacagagcaagaccctgtcttcaaaacaaaacaaaacaaaacaaaaaaggccgggtgtggtggctcacacctgtaatcccagcactttgggaggccaaggtgggcagatcacttaaggtcaggagtttgagaccagcctggtcaacattgtgaagccctgtctctactaaaaatacaaaaattagccaggcatggtggcgggtgcctgttaattccagctacgcaggaggctgaggcaggagaatcgcttgagtccaggaggcagaggttgcggtgagccgagattgcaccactacactccagcctaggtgacagagcaagaatctgtctcaaaaaattccaaaaaacaaaaaacaaaattgagatgtaattcacatactataaatttcatataattcagtgatgtttcagtacatccacaaggttgtgcaaccatctccattagctaatttcacaacattttcattattctcaaaagaaacctcacacaccttagcagccagacacaatttccccctccatcctattccctggcaaccactaatctactttctgtctctgtggatttgcctattctggacattgcatataaatggaatcacacaatatgtgatattttgcatctggcttcttttagcttgctttctaggttcatccctatggtagcatgaatcagtatatcgttcccttttttggctgaatagtattcctgtatatggatataccacattttgtttatccattcatcagctgatgggcatttgggctgtttccgctttttggctattacgcataacgctgttacaaacatccgtgtatgcgtttttgtatgaacatatgtttccacttctcttggggacatacctaggagtggaattgctgggtcatatgataattctatctttaactttttgaggcgctgccaaatgaaattcatatactttttatgtgccacaaaataccagtcttgttttgatttttaacatcatttacttatgtgaaagccattcttagctggtgggccatacacaatgagggggtgagctgggtttcgtccatggaccatggtttgccgaccaccggtgtagacagtggaaggaatttgggcttattctgtgtgtggcacacagaatgtaggattctaggggaagaggttgatagggattagttagatacatttaaggcagggaactttatagcctccttaagccactcttggcatggttactgtttagaggaaatttcatctggagaaaatgataatcgcctcttagaaattctcagattggacctctcctctgcacactgtccgtatgctctatttcctcaattgtaaatggtgttaaaaatgtacctccttcaaagaggtgttgtgaagtttgaatgaatgtatatatatacacaacaccaagaacagtgcctggcacagaccaagacctatataagtcgttgctattattattgctattgttgcaattattatccacacagcctcagctcaggcctcatcctcttcgccctggaatatgtctccctccagtctgttcccagcatcaaccagcccccaaagtttcttctaacactgggatctggccctgtccttcctctgctacaaactttgtgtagctccctagcacccttggcgtcaacacccagctcctgggcccggcattcgaggctcaccatggctataccttcccctttctctaacctcatttcttgtggctacagcttatgttacagctacatgggtggaccagctctattttccctccttccgaaacctttgcccatgctgtgcactctgccagtgtgcccttattcttctctgggcctcatcctttaaggccgggcgcggtggctcaaacctgtaatcttagcatttggggaggccgaggtgggtggatcacctgaggtcaggagtttgagaccagcctggccaacatggtgaaaccccgtctctactaaaaatataaaaaaaaaaattagtcgggagtggtggcgggcgcctgtaatcccagctacttgggaggctgaggcaggagaatcgcttgaacctgggaggttgaaggttgcggtgagccgagatcgggccactgcactccagcccaggccacagagtgagactccatttcaaaaaaaaaaaaagagagaaaagaaaagaagacttgaacaaagaaatctttccttcatttctcttgcccctgccccaggcaggtttggcactccttccagagtcccacacagcgtgctacttccttgtagcacctatcaccttatatgtgacttaatcagtgtgttcctattttccttctccaattgtattgtgagctcctggatggcagatttagggggataaagggggaggtggttgttgattcatctctgggctccctgcacccaaccaaggcccagcatacaaggggcttcagggaagttagtccaggacagaatggggaggaggggaaggcagtgaggtggggctggggctgggaaaaggggcccacttctaatggacgagggcaccccctctgctcccctaggcctctccttggtggtgggcttggttctttacatctccagcatcaacgacgaggtcatgaacaggcccagcagctctgagcagtattttcattatcgctacgggtggtcttttgccttcgccgcttcctccttcctactcaaagaggtgacgtccgtgggacctagactctagagttctgaatggagagaggtcttgggggcctggttcctgagtccaggaggaaggagaggctggagatgcagactctggcgtcagagggaggtggtagctgagggtctaacccctgggtcctggaggaagaggggtctgagagctccaacttttgggatcctgggggaggaggggtctggagactgggactcctgggtcttgagggaggggccaacctgagggcttggactcctgaggtcccggggaaagagagggctggagccctgatcctgggtcctgggataggaaggggcttggggtggggactctgagtcctggagtgagaggagatgagtcggggtccggggatgcgcaggggggcgcccctgggactctgaccttgccttgccgcagggggccggcgtgatgtccgtgtacctgttcaccaagcgctacgcggaggaggagatgtaccgtccacacccggccttctaccgcccgcgtctcagcgactgctccgactactcgggccagttcctgcagcccgaggcgtggcgccgcggccggagcccctccgacatctccagcgacgtgtccatccaaatgacgcagaactaccctcccgccatcaagtacccggaccacctgcacatctccacctcgccctgctgaggcccgcccctcggagctccccctgcctcctcctcctcctcgtcttaggggggtctccctgcaatgcagcgcccccttccgtcctcgggactcctcgctcccacccggaggaggctgcgccagctttaggccccgccctcctcccaatggctccgcccacagactcccttatttcaatggccgcgccctcttttcccgacctctccttttcattggtccctctcactcccaaatgactcctccccttcgttggcccgcccctttcctctggcccctcctctccaagaaaattagctcctccctcgttctccacctgctctgagctgggagcagccagaggcggtgcaagcgcccagctccccagagctccccaacctcggacctcaccgcaggggcgctgggctggagagcaggttcgggcagccgtcgggaataccgaccatcctcttctcccttctaacctgggcttcctttttccctgcctaatctcacctcctgacctgctgggtcctccggtgcagtgggagggccggcttgctccacccgcagccccggggtggcgtagggaagggggctggaagccacgggtacggttaacctggcccttccctccccatctcccctacttccctggaaggtcccattctttctcaccggctgggctcttttctgcttcctgaaggttacctgccttttagggggctcttgtctaaaggatcttcttgctttctcagctatccttggcttctttttcgtcttcctcctcctttaactctttctctcctttcctcccttcacccgttcgtcccaagcccttgggtgcatcccgccctaggcgcacaccagacggccagaatggggaccctagggtggagggaattcccccacgccatctccgcacctgtgcccgcctctcccccctcgaggccccgtcgagggagggaggggcagtagcgggggtcgacaccccccccaaacctctaagtcttccattttctggctctcctcctcattgacgtccctcttcccccctcagaaccccaactctggcctctttcaagggcccgtccgccccgttggacagattttggggggagaggaggtcaccaggaactcgcccacccccccttattagggaaagaggggcgaggtagcacagtgctgtacacggaaccagaatggcccccggggtggggggaggggggcaggggagggacgggggcttttagtttgcatcttaggtgggaggggggaggggggacccgccgcagttaacctgactttacgcagcgatttttaacgaggctggggggaggggggcactggggtggggacagggtggggtggggggcctggctctgttatttaccgtgtatcatatgtaaatatcgacagaaacttcaataaactttatttcaaacacgtctccgcctgcccggagggaagggattggatagagggggcttagtctgggtctctgcttctagggttgcaggcctaaagtactgcagaatgacgttagatgggtcgttgttaaatgacttaatcatcatcattatcaacggcagcgctttatacttcagtccgtgtaaagcatgcaggaccgtaaatgatactggtcaggatcaataaacgctttctcctggtattattatgaccacgtagagtactgttactatgactcggcttccttcgacattcattgcttcttttaacttttcccccaagcctgcacggtcaatttattggcctcattttgcagataggtccagagaggtgaagtgacgtatccaagatcacacaggtggaagttggcagagccatttgctaaagccaagtttaggcctggtgcggtgactcacgcttgtaatcccagcactttgggaggtcaagctggggggatcacttgaggtcaggagttcgagaccagcccagccaacatggcgaaaccctgtctctactaaaaacacaaaaaaattagctggccacggtggctcacgcctgtaatcccagctattcgggaggctgaagcagagaatcgcttgaacttgggaggcggaggctgcagtgagccgagtgcactgcacgccagcctgggcgacagagtgagactccatctcaaaataataataaaaccaagtttatctggttctgaagctcaggcttcctcccccttgcactaggcagtggtgggttttcccaatgcttggctcagtccctctgttaagaaatgactgctaccatttactgcacacctaccctgagccagacgccttccttccttacatgatctcattagacattcacagcaaccctgtatgtaggaattatcaccccatttttgcaggtgaaggaggcaggctcggaaagtgggtgccacaatctgcagtctcacccactatactgagagactgagaacagcctaaatgtttgataagcttatttttgcagcgtattgtaaaggaaacaccgtgccagatcttcccttctttgccttgtctagatttggcctcttaaggatccatcagaataacttttgctgttacagtcacaactgttaacaaccaagacacatttatcaggtcatcattagggtatcagacaccgcactaagcacttttttaaaaaaaaatagagacagggtatccctgtgttgcccaggttggtcttgagctcctgggctcaagggatcctcctgcctcggcctccgaaagtgctagaattacaggcatgagccaccctacccagcctgcactaggcacttttgatttattagctcattgaatccttccaaccatcctgtgaatcaggcatcccaattagccccattttatagatgaagaaaccgaggctcagggaagtgaggccacccagctggtaagatgcggaggagaattcatgcccagcctgtctgacctcagagcccacactcttagctgctataatttactactatggatttggtgcaaactcattctgtgaccttgagcaaatctttgaatctctggggcttcagtttctttttctataaaaaaataaaaaaataccgagggcactggttggtttagaaggattccaaatccctctggaatagggaggttggtgggggtaagttagcaggaaagagttctgaatcagcaggactggactcccggagggaaatattctaagtcattttcaataatttcaccaatttctggaggtcatgcttgagattcgggatggcaaatcatgtttcagcttcgttgtcaaaactaagtgattcgtacgggctgcttggagcccggtgttagaaggattctgaacatctgctcagtgggaaagagtgttgccattgattggtgctgtctgccgtgctgctcaattggtgctgtctgccttgcctgcaggatgggctgtggtgacgcaaatgctagatacttgctaacactatggggaagttaacaacctaaaatcctaagggttgtgttcttttaaaaaatcaagctagttcttttgtttattaaactttgaaaatggaatgtaatcccacagttcgagattggtgagttttttgatttgttttaaagaaatgctgtgaaaagttccacctttatttatccaaagtaagtcaggatgtcctaacattctgaaatcctcctcttcctgaggcattattagttttcaatgtataatttcaggaatactctatgcatattcaagcatatatgcatgtgtttaaatccacatacagatgagtatgtggtatacatatttttattttatacatttatcatgtaatgcacatagttctgggccttccagtttcaaatgagaatgcatggggctcatttagtatgttatataactctactgttttccaaggctgcttaataacaattgtttgcataaattaattgcgtaatttattgagtgcttacatgccagccactttgtgtttcagtcctaagccttttacattctgtaacctcaggaggtttagtactcttagtatcattctcactttataaatgagatcctgagacacagagagggtaattagctttctcctggtcacacagctagtaagcggtcaagctaaaatttgaatcctgggagtctcttgtgtcgacaatacttatccgctaagctgtatacctttgtgtgtgtgtgtgtgtatatatactgccctccttggcctcccaaagtgttggaattacagttgtgggccaccatgcctggccctctgtgtatattgaagccacctggttccatctatttatctctctctctctctctctctatatatatatatattttttttttttttttttttttttgagatggagtcttgctctgttgtccaggctggagtgcagtggtgccatcttgactcactgcaacctctgccttctgggttcaagcaattctcctgcctcagcctcccgaatacctaggactacaggcacacaccgccacgcctggctaattttttgtattttagtagaggcggggtttcaccgtgttgcccaggctggctgtgaactcctgagctcaggcaatccacctgcctcggcctcccaaagtgctgggattacaggcgtgagctactgtgcccggctttttttttttaaacgaatctcgctctgttgcccaggctggagagcagtggcatgatctcggctcactgaaacctccaagtcctgggttcaagcgattctcctgcctcagcccccagagtagctgggattacaggtacacgccaccactcccagctaattttgtatttttagtagagacagggtttcgccatgttggccaggctggtctcaaactcctgacctcaggtgatctgccctccttggcctcccaatgtgctggaattacaggtgtgggccaccatgcctggccctctgtgtatattgaagccacctggttccatctgtttatcaatgacctatatctccctattgcccttagaagtaaatctaagctcctcacctatgtccttttgccaagagcacaagtctcaacatatgccgtccccactgctgcctcctgcagactgaagttgtcttccctaccattcccagctccttgctgttctgagggtttccttccgaggaatccccttccatctctcagccatatggcaaaacctctatccactctttttttctttctgagacagggtcttgctctgtcacccaggctggagtgcagtggcacaatcttggttcactgcagccttgacttcccaggctcaagccatcctcccacctcagcctccccggtagctgagaccacaggcaagcaccaccagacctggctatttttttttttttttttgtatttttggtagagaaggggtctcatcatgttgcccaggctggtctcaaactcctgagctcaagcaatccgctgacctgagcctcccgaagtgctgagattgccggcatcagccaccacaccgggttctgtccactcttgagattcaacttacatgctccttccaccaggaagccttccctgagctcccaagcctgcatcagggtctagctaaatgcttccaccctaccctatactgccccccttagaccacactggtttacaggacaataccacataccagtgcttttcaaaatgtgtcctggggagctggaacatccctgagactcatttaggaagtccacaaggtcaaaggcatttttatcgtaatactaagatattttcctttttttcattcttattctctcatgagtgtatagagtctggaggcttcacaggaagtaagaacacgactgaacacagaagcagatatgagactgactttcttctgttgagtcaaacgttaaatctattttaaaaaatataaaccaataccattatataattttttaattttggaaactagttatttttattaaagtaagttgcttatgtaaatatacaataagctgattattttacttaaatacatattttagattttcttctcagtttgaattgcaaatatgcaaaatatcgatagacatagcacaaatttgaaaagctctttggggtcccctacaattttctttttttttaattttatttttagagacaagatcttgctctgttgcccaagctgaagtgcagtggggttatcatagctcattgcaaccttgaactcccaggttcaagcaatcctcccatctcagcctcctgagtagcaaatactacaggtgagcaccaccatgcccagctagtattttaatttttttttgtaaagatggagtctcaaactcacggcctcaaatgatcctctcacctcggtctcccgaagtgttgggactacaagtgtgagccaccagctctctacagttaagtgtacggagggatcctgcattcaaaggtttcaatgctaatgctgtatgtcacagagttagtaagatttacctaattcctctaatgactatgtagtggtccattgcagagaggtaatttatgtgaacaataaactcattttaattacgaatttatttatttatttattattcttaatttttaatttttttctattttaaatttttttctatttctataataaattgattaatttatttgagacggagtttcacttttgtcacccaggctagagtgcaatggcacgatctctgctcactgcaacctccgcctcccaggttcaagtgattctcttgtctcagcttcccaagtagctgggattacaggcatgtgctaccacgcccggctgattttttgtatttttagtagagatggggtttcaccatgttggccaggctggtctcaaacccctgacctcaggtgatctgcccgctttggcctcccaaagtgctggggttacaggagtgaggcaccgtgcctggccctgaaatgtaatactcagtcatgatttaaaagtttcagcatcagagaagggtataaagaaagtagcttttggctgggcatggtgactcacgtctgtaatcccagcactttggggggccaaggcgggtggatcacttgaggtaaggagtttgagaccagcctggccaacctagtgaaatcccatgacatagtctctactaaaaatacaaaattagccgggcgtggtggcacatgcctctgatcccagctacttgggaggctgaggcaggagaattgcttgaaccccgggaggcagaggttacagtgagccgagattcagcctcagcaacaagagtgaaactccgtctcaaaaaaaaaaaaaaaaaaaaaaaaagaaaaagaaaaagagaagaaaaaagaaagtagctttctcttcactcttctcaattccagcctcatttcccagagagagtgactgttcccactttcttcctttaggacagtggctctcaactggaagtcatgttgcccccaggttgcatttggcaatgtccagagatatttttgtttttgcttttttttgtttgtttgttttttgttttgagacggaatcttgctctgtcgcccaggctggagttcagtggctcagtctcggctcactgcaaactctgcctcccgggttcacgccattctcctgcctcagcctcccgagtagctgggactacaggcgcccgccaccacgcccggctaattttttgtatttttagtagagacggggtatcaccatgttatccaggatggtctcgatctcctgacctcgtgatccgcctgcctcggcctcccagagtgctgggattacaagcgtgagccaccgcgcccggctgtccagagatatttttggatgtcacaactcagggctggggggagtgaggtgctacgggaacctagcaagttctggaatagaccctgaaatgtgcaggaaggccacccatggcaaagaatcatctggtctccgatgtgactggtgcgacagtgattgagaaagcctgtgccagacttttatctagaaatcaataaatagaaatatctttatgaagatatttcttttgcggctgggcgcagtggcttacgcctgtaatcccagcactttgggaggccaaatcaggtggatcatgaggtcaggagttcgagaacagcctgaccaacatggtgaaaccctgtctctactaaaaatacaaaaaaaattagctgggggtggtggcgggcacctgtaaccccagctactcgggaggctgtggcagaagaatcatttgaacccgggaggcggaggttgcagtgagccaagatcacgccattgcactccagcctgggcaacagggcaagactccgtctaaaaaaaaaaaaaaaaaaaaaaaatatatatatatatatatatatatatatatatatatatatatatatatatttctttttttcttttttacctttatttttatggacacaaatgagtttttcctaaattgattcataagctgtgattctttttttaatttttattttgagacagggtctttctctgtcgcttgggctggatggagtgcagtggcatgaccttggctcactgcagcctcaacctcctgagctcaaggcatcctcccacctcagcttcctgaggagctaggactacactcctggttcattttttaagaattattttttggcctggcatggtggctcatccctgtaatcctagcactttgggaggccaaggcgggtggatcacctgaggtcaggagttcaagaccagcctggccaacatggtgaaacccccatctctactaaaaatacaaaaaattagccggatgtggtggcggacgcctgtaatcccagctactcaggaaactgaggcaggagattcacttgaacctgggaggtggaggttgcagtgagccaagatcgcgctactgtactccagcctgggcaataaaagcaaaactccatctcaaaaaaatatatatattttttgtagagtcgggggcctccctatgttgcccaggctgggctcaagcaatcctcccgcctcagcttcccgaagtgctgggattacaggcatgagccacggcgctctgccagctgtgataatctgcaggagattagggacctcttggagagtcagataaaagctacggacccccaggaaaaaaatacttatactcacaatattctgtacataatatcaggggcttcagtgacatcccattagctctggcagaatgccttggatgtgtgatttcgaatcacagtctcaacaagagagagatcactaacggtatccctcttccccttctacagatgagagaatgagagaaggaagctgcagtgagaatcaagctttggatccgggttccttggggaggcaaagaagagccggagttggaactccagccacctggctccccagcgttggaatatttccacttcaccctgaatgaggacgtttaagaaacgctgatcgacgcttcctggtacagcaggaagacatgccaccaccaccctgttcctcttgaggaaacacaaaggccccagctgttgttgatgagaaacactcgcgcacctgggaaaaaccacacactcaggatgtgaggcagggagaagggttggatagggacaagaggttggaactggctgcgtagagggtggagaccctagaatatgtatccactcattccctgactcattcattttctcattcattcgttcattcattcattcatttgttcatcatccctggacccgagggctcctgtccatcagggctgagctgggatctaggggacacggaagtaaatcagacccgtgcctgtccttgaacagctccggcaccagtgcggagaagaccgacccacatgtcaatcacaatatagccttgctgtggctttaaggagccagtgcaggcctggtgggagcactgatgtagaccctgatggaggcttgggaggtcagggaaggcttcctggaggaaggagcgtgtaagttgaatctcaagagtggatagtgccaggtgcagtggctctgtaatcccagcattttgggaggctgaggtgggcggatcgcttgagctcaggagtttgagaccagcctgggcaacatgacgagacccccttctctaccaaaaatacaaaaaaaaaaaaaaaaaaaaaaatagccgggtgtggtggtgcttgcctgtggtctcagctactggggaggaagaagtgggaggatggcttgagcctgggaagtcaaggctgcagtgaaccaagattccaccactgcactccagcctgggtgacagagcaagaccctgtctcagaaagaaaaaaagagtggatagagggtttgccatatggctgagatggaaggggattccacggaagaaaaccacccaggaaaccctcagaacaggaaggagctgggaatggtagggaagacaccttcagtctgcaggaggcagcaatgggggcggcatacgatgagacttgtgctcttggcaaaaggacataggtgaggagcttagatttactcctaagggcaatagggagacataggagaattttattttattttattttttattttttatttttttgagatggagtcttgctctgtcgcccaggctggagtgcagtggcgtgatcttggctcactgcaagctccgcctcccgggttcacacaattcttctgcctcagcctcccgagtagctgggactacaggcgcccgccacctcgcccggctatttttttttgaattttttagtagagacgggggttcatcgtgttagccaggatggtctcgatctcctgacctcgtgatccgcctgcctcagcctcccaaagtgctgggattacaggcatgagccaccgcgcccggccgagaattttatgttattattattttttgggagacggagtcttgctgttgcccaggctggaatatagtggcacagtcttggctcactgcaacctccgcctcccaggtttaagtgattcttctgccttagcctcccagggagctgggattacaggtgtgcggcagcacacctgtatttttagtagagacagggtttcactatgttggccaggctggtctcgaacccctggcctcaagtgatccgcctgccttggcctcccaaagtgctgggattacaggcgtgagccactgcgcctggtgagctctgggtctcacaaggctgaagttaagatgccggctggctgtgtcctctgctggggatttggctagggagagaactacttccaacctcccacaggttgagcagaattcatttccttgtagttgtttggctgaggtctctgttttctagttagcagttgccactcactctcaggtctttgccatgacaagacagtttgcttcctcagggttctcagcaactcctttgctttggttatttctgacgtcttgatcctttcctaagagatcacctgattaggccaggcccacctgggataatttcttttcttttctttctttttttttttgagacggagtctcactgttgcccaggttggagtgcagtggcgcgatctcggctcactgcaggctccgcacccccggggttcatgccattctcctgcctcagcctcccgagtagctgggacttcaggcacccgctaccttgcctggctaattttttgtatttttagtagagacggggtttcaccgtgttagccaggttggtctcaatctcctgacctcgtgatccgcccacctcagcctcccaaagtgctgggattacagacgtaagccactgcgcccagccggataatttcttttttaatgaagtcaactgattagggaccttaattatatttacaaaatcccataccttgccatataatgtcacataatcatggggactgcatcacctcctagtgacagctcttgtccacacccaagggaaggagattctcttgggtgtgtacaccaggcggtgggaatcttggaggttattttaaaattctgcctatcacagttggaagtgaggaccgaggaccttctcaagggaagggattagcaaacctatctctaagtctgcaggctctaggtctctgggtcaagcccagcagaggccttggctaatgtgaaatgaatatgtgagcaaatgtagaaatgagatcttataaaagtctacaacctgcttcttctgtgacaccccttctgaaggggccttccatgagctgaaggagtgatcagtgggttcaatactcccatccatctatctttctttctttctttctttcttttttttttgagacagagtctcactctgtcgcccaggctggagtgcagtggcatgatctcagctcactgcaagctccacctcctgggttcacgccattctcctgcctcagcctcccgagtagctgggacttcaggcgcctgccaccacgcccggctaattttttttattttttatttttaatagagacggggtttcaccgtgttagtcgggatggtctcgatctcctgacctcgtgatctgcccgccttggcctcccaaagtgctgggtttacaggcatgagccactgcgcccggctttttttttttttgagacagagtttcactcttgttgtccaggctggagtacagtggcacgatcttggctcactgcaacttccacctcccaggttcaagcgattctcctgcctcagcctcccaagtagctgggattacaggcgtgcaccaccatgcctagctaatttttgtatttttagtagagacggggtttcaccatgttggccagcctggtctcgaaatcacgacctcaggtgatctgcccgcctcggcctcccaaagtgctgggattacaggcgtggaccaccacacctggtaatactcccatctttcaaaatgaagtgaagagatgctatctcattccttaaactcattctacaagttcactgccaggtatgtgcccaagagatatgaaaacatatgtctacacaaaaatgtgcacacaaatgttcacagcagcattatttgtaataaccaaaatgtggaagaaactcaaatgttcattgatacatgaatgaataaataaaatgtggtatctcccgctataccatggaatgttattctgccataaaatggaatgaagcactggctcatgctacaacatggatgaaccttaaagacattacttacttagcctgaaagcagccagacacaaagaaccatacgttgtatgattcaatttctatgaaatgtctagaatgggaaaatctataccgacagaaagtacattagtgattgcctagggctggagtgggtgcttagattgggggtgatggctaaggagtacacagtatctccttggactaatgaaaatattctaaaagtgatctgaagttgatgattgcacagctctgtacaattaaaagccgttgaattgtacactttaagtgggtgaattgcatgatatgtgaattcgatctcaataaagctgtgaaaaaaagagatatactctttagttgttgaaataaatcatgatgtaatcatgcatcacttagtgtcacaaaattaccaatagaagaactaacacttgaggaagaagggaaggaaaagtgagggctgcatgaattgatttgttatctattagagaaaaaatatctataaataatgtataattttgattccaaaagaaaatcattatttagggatgtcaaggcaagtaagagaagaaatagctaagaatattaatagacggccgggtgtggtggctcatgcctgtaatcccagcactttgggaggccgaggcaggcagatcaagaggtcaggagatcaacaccatcctggccaacatggtgaaaccccatctctactaaaaatgtaaaaattagctgggcatgttgctgcatgtctgtaatcccagctactcgggaggctgaggcacaagaatggcctgaactcggcaggcagaagttgcagtgagccgagattgcgccattgcactccagcctggcgacagagtgagactccgtctcaagtaacaagaacaaaagcaaaaacaagaatgttaatagacttttccaataaggaaaaggacttgaggtggaacaggctaaattatttttattgtagtcccttgtgtaccatttgattttttttcttttctttttttaaaccatgagcctatattgattggactaggaaatatattttcatttaaaataaaataaagaggtttcccccagttgctagttcgtataatttaatagttctcaacaggggcgattttgttccccaagggacattgagcaatgtttggagacatttttggttgtccccaaatgctatttttagggtgctatttggaggtgctattggcatctagtggatagaggcgaggagtactgctcagcattctacaatgcacaggacagcctccaccacacaaaattatccagcccaaatgttgagaacgttgagattgggaaaccctggctttaaaaaattatcttcatagtcgttctcaccagtgcagttgtatcagcacaggctctggaatttgatgtcctgatgaatgtcctccaatacaactgacctctcaacctcagttttcacatctttaaagtggaggctgctaacagaacccacttcttttgaagatggaaccaataccctcaggctccttggagtctgtaatattaaatgcccagtttgtttttatttttatttttttcgagacggagtttcactcttgttgtccaggctggagtgcaacggttcgatctcagctcactgcagcctccacctccctggttccagtgactctcctgcctcagcctcccaagtagctgggattacaagcatgcaccaccatgcccggctaattttgtatttttagtagagacggggtttcaccatgttggtcaggctggtctcaaactcctgacctcaggtgatccgcccgcctcggcctcccaaattgctagggttacaggcatgagacactgcacccagcctaaatgtccagtttatattggttatcatcattgtttgctgatgtatctccccccgcatcccccagcaaaagagcagaaaataatcaactttcctcaaacgaatgaattccagaccccttcccttgggggctgtgtttcttagcttctaaaccaggagtgttggaatgcatgtctaaactttctcccatggggcggggtgagaattaagtgaaacgacctaaagaaatttcagtagaaatgtgagatgctggggactgaaagatatcgcccctccaaaggaaggaaccagcaggagcaaacactaggtaaatagatttagggaacacaggttattcctgtttctgccagcccccaggagggagcagtaaaggtgtgctgggttaaatgactatgaatttcacctattgttggccgccctccacccccataacccctattgtctcagagcctcaggttactcatggttaatgtaggaacattggtgcccacacggcaaagattctgtaggacttctgtaagacagcgaagcatgccaacagccttcaatcagccatggctactagttcttagtttctgataacatttttacgaggatcgggtcttgagtaaacggcttgcctagagccacgtgcaatcccacttcccatccgcgttctcacttggttggaggcagcttctgtgccctttataaccaagagcaactgagtatagaggagaagaagtgttttgtccaaggtcacacgaagccttgggagcatccgtgaaatttggacccaagaccgaactttcagactctgatctcagactttccacctccgattgttccacttccccaacctactagctagttctagaacggacagatccatgcttctcaaaactgttgcatagacccctacccagtcccagacaagtttctttaagacatatttgcacccaagcttttggcattctactctccttcccagccccagccccatctcgggggcatctaactctaccccttcttccccatcaggtttgaactaggggaggggagggggatgagaagagaaaagaaaaaattgttggtgaaagtcaaaaggcttgttaacgtggtaagttcaatattgttttatctggggtggtggggggggaatctttgccctcgccacttggaggaggagcggtgggaagaccccgggaagttgcgctttcccttggattttgggaaaggggagcattcctggggtccttttgaaaaggccctcccctcatttccggccgccgctgccagccttggctgggcgcctggatcctgttgctatgacgacaggaagaggcggtggcggcggcaagcgatgctgaagagagatggaggctagtgggggtgggggtggtggcattggaatgggggagggggcagggatccggggctggggacgcgggagggggcgggggcaggggtatccttcatctctgacctcctcggggcttctcagcctcacccctctcccgttattttttctgggcttccttcgggtgcatccccagtctctgtgtctgcctctgtttctctggatctctctctcttcctgtctcagtccctctccgtctgtctctctctgggtctccctcttttcctgcacttgcctttctttccccaggtaccttctgccatccaggcccttctaccctccatttctttcatttactatcttgctcccccgctccctctccgcatcttcttctctctttaaagcttccttctctctagcaagaccttgcccccatccccaatttctctccctacccgctctccatttcattccctctcccccctctctcccccatcctctcagtctctctctttctgtctgtctctccccatctgtccctcctccctcctctctggatgactctctccctctctcttctttccttctgtttcccagatcctgaccccccccacacacacacttaccccagccctcccccaccccctcccccccagcccctgcgtttctctctttgagtctctgtccctgtccccttctctctctggatatttctctgtgtgtatctctccaacttccttctgcttccagccgctgcctcccccaaatttctccctcccccatttctgtttcgcggtctctgggtctctctctttccgtttctcctcgtctctctctgtctctctccctccctctctggatctctctcttctcctccggcttccttctgccactcgaccctgcccccctctttcccttcccccatccatctcctctccgaggctccccatccctcagcagctcccctccccctccctccctactccctccctctcgtcctccagctccgcactttacccagcgacacgagaaccaaattgtctcctcaccttttttttttaatatatatatcccgaccctcactcccttggggcccaggctcagagctgccccccagccccagcctgacctcagcacccccattccccatacgcctcctcatctccactccccgaaccaggtcggacgcctgggtccctcactgctgggggagggggaagcagcgagaattgggagccaaaaggtttttctggggggggtgccaacagggggggctcgacgtcccctcctccgtgcatcggagagttgacctatcattaacagaggtgagacagatctttttattaatcggaggtgggtggaggtagaattaatgttctgtgatccccccccccgaattctggagaaaagagctggtccccttcctaaggagaaaggagagtgaccccctcatatccggaagctttagaattgggggtccccagctctcttctccctggcagctgctgaacgatggactaagagtccctaaaaccagattgtgccccaaattgacaaaatgaaaagatcttcgaatctttttttttttttttggacggaaggagaatttccctcctttccctcctcttcccttcccctcttatcccaggttgttaggggcctggggtcacaggcttaccccactgagagcagatatctgttaagacagggtaggtggccctgctggtggtgaggggcaccaattcggggagaagaggccaagagatcaagaagagaggaaactcagcatgcggacagaaaagagaggaaggggccggcgcccaggccgggaggctgggggttgccctgtccagcgggctgctgaactgtggcctgaggaagggctgtgtgtgggcagacgggagttgaggtgggggagggaacacaacgtgtggggcactaggcccagttgccatggagacaccccccatagacaacctttttccacagcccctcctcggagcagccccagtctgaggccagctgatggggggcagtggagacgggcaagcaatcaggaggccaaggtcaccctgtactgggacctaggttctggtttttgttttgtttttttttaatcccctcttcgtctaaggtttccaggctcttaactatagtgggtttgggggaagaagttgaagaagcagtgtggaagcaagtaaggagtacatcccccagaggacagttggggtgggggagacaggcagggctgggggcatggtggtcgggggagaatgtggaagagagaaatgaaggagccacggggcagcgggtgcaggctgggaaagtattcctaattgaaaagagagttgtagtcttgcggatcacatttttcagagggacacagtctactgggggggctctttctgcatgtggaagaagatgaggggctacagtgtgtgttcctgtacaggtgaagtcgtagaggggagtactggggggcgttcccaagaagggaagcctgtgggggcctgcggaggggattttccggggcagaggagaacctgggagctatagcggtggagcaagaggaagtgagtcaagggaattctatatgatgagagagaagttggggaggatgcttcctggtacattgaagagagagtgggcttcaaagtgagttagggggatctcaagttgggggaaacagtgtgctgaagatcccgtgtgatgatgaagggctacgaggaggggatttggaggcagtgggagctgctgtgagtgcagaggggcgggtgggtggtacagtgtgccccctgctatgggagtacagggcagagattggaatggtcctgagtggagagacatttggggtctggaggaagccattcttgcgagtagaaaatgccgtggaactcacggaggaaatttttcttaatggaggagaaaacgatggttatgatatgagttcgtttaagttgtgggggggggggtggcggggtgggaagattcagaaaactcttctaaagcaaaagagagggtgggggttttcctggagtaaaggcatagtatggggtggggagtgagtggcttgtggggagacagtgggggctgtgacagggaatgggctggagatggcggggggggggcagcttgcaaaccagtgggtctgatgttgggtgcattagaattccccagggagcttttaaaaacttacatgcgcaggccacactgcagaccaaccatgtcggactttctcaggtgggactcaaacatccgaatttttaaggtcctcgggtgatttccaggtgtgttggaggctgcccgaggcaggaagggggcttccagggagaggaggctgactgagggtggctggtgattccgagttgcacaaactgtgagggtcagctgggattttctttttctttttcttcttcttttaatttttcctttttagttgaagagaggttgagagatttattttttcctaaggagaggaaactgtgggggaccatttggagtgatggaatgacaaaagccagaccggagggggctcgcggaggttactcccacggaagtggtgctactcgggcttcttaagttgtggagacgctcagggaaaagttgggctgacagggaagggttctagcgggtggagaggtggggcttgcaggggaagagtggggagagctggtgggcgccgcatggtgatggggcgggggtcgctaaggaaggaagaacgcgacgggggctcctggggaggaggcggcggcgtggggcttggcatcatggcggggggtggcttcccatgcgatgaggatcgtggagccccctggggcggaggcggcgcgggctaggggcgagggctgtgagtgtgagcggtggtggggactcctccgagtggggttagtgggatggtgggacgactttcttgggcagaagacaggagtggagagagatttcatcttatttattaattattagcggtggtggggactcctccgagtggggttagtgggatggtgggacgactttcttgggcagaagacaggagtggagagagatttcatcttatttattaattattagcggtggtggggactcctccgagtggggttagtgggatggtgggacgactttcttgggcagaagacaggagtggagagagatttcatcttatttattaattattagcggtggtggggactcctccgagtggggttagtgggatggtgggatgactttcttgggcagaagacaagagtggagagagatttcatcttatttattaattattattattattattattattattattatttttgagaaagagaagcagtggagccccgagtggaaggagtttctggagctgaggcagggattttgggggggggggggcggggactgggggaggtacctgtgccttcttctcctctaatgcgagatctcgctccttgccctccaccagccgccgaccatggccgcgctctgaccccctccccggccgcagcctcctcctcgccgcccccctccccagccccgccggccccgggccccccgcttctgcctgcgctgtgaacccccccccagccgccggcacggccccgcccccgctgccccggtggtggcccacggccccccggctgcccgtggtcaaactggagtcgctgaagcgctggaacgaagagcggggcctctggtgcgagaagggggtgcaggtgctgctgacgacggtgggcgccttcgccgccttcggcctcatgaccatcgccatcagcactgactactggctctacacgcgcgccctcatctgcaacaccaccaacctcacggccggcggcgacgacgggaccccccaccgcgggggcggcggcgcctcggagaagaaggaccccggcggcctcacgcactcgggcctctggaggatctgctgcctggaaggtagggtgcgggcggccctccccgcagcccccgccgctcccctccgagagaccctgagcctcccggggctgcctgtccctgatcctggggcccccttgggcacccctcctcctctgccagaggggcttctgcgccttcccactcgcgcccctgacctcctctcccctccttcccactcctccctgcgtcctggcaccctgcggaattcctcggcatgctccctctgcagcccctctgcctctccgctgaacccccttatcctatctttccctagtccgtgtctcctgcgctgccccatcacacccctgcatcttccctctctccagtacctggggctcctcctgtttcatttcttccactctgccctgtgccttttctctttttttttttttttttgacaaggtctcactctgtcgcccaggctggagtacggtggcacaatcacagctcactgcagcctcgaatccctaggctcaagccatcctcccacctctgcctcctgagtagctgggaccacaggcatgagccactgtgcccagctaattttttttattatttgtagagatgaggtctcctgttgcccaggctggtctcgagctcctgagctcaagagatcctcctgccttggcctccaaagtgctgggatgaagggcatgagccactgcacccagcagcctctttctccctctttcccgtcagttcatcttgaccctgctcctccgctccacctgccccttcatttcctctccctcgtgccccgtgacatcttctctctcccgacatttcccccccagtcctctgaagtcccctgcctctcccgccccctttcacggcccagtcttccggtctgtctctttccccttctctttggctgctgctcccctgaaacttcgtgccttaactcgccctcactcatgactttctctcttttctgccttgtgcttctcctcctgttcatctttctcttcccatcagtgcccccacccatgtctctcccaccagggtgccctccaacctcccatcctggtcctttcctcctttttcctttagtggactccacttcctcttcctccactcatgcctccttcgacgtcttcctgactcgatgcctcaggccttcacgttaaggcttctcgctcctgcccctgctacctcctcggatcttcgacttggttcttttcctctgtcctgttctccctctcacagcttctctcctagctcggctccctggctctcgacttccccacttctccaagactcctgccctctgctgtgccaaccccttctctctcccactcttagcatcagtatttctttcctgagtatcaagtagctgcggggctgggaagcaggagtcttgggtgccagttctgctgcatatctgccctgctgtgtgaccactgtcttccctcctgcaccccagcctcacagcccttgtctgcaacgtgaaggagtggaaccagccatcctgatgcccccttcggccaaaagattgaaatctcttgcttctctttttcatccccctctatttcctctgccccttcttcctctgttttgctgagtgttcacgacaagccgggaacgttatctcgtttaatcctatgaggtgggcaccacctcgctgttggggatgggtaaactgaggctcagagaagtgaagtcacttgcccaaggtcacctagctgagaaaggggccgagccaagagcagaactcgaatctcatggatgggattcacagatgcgctctgtctagtgtacaaagtgtttaaaactgaaagcaaaatctgaatccattgccaacagttaaaaatagggaggcttcccattgtagttctgatttccggcttcttctgagctggcggaagatctagcacaagcctgtgttctaccctgaccacgatgggccggatctgagcagcagctggggggtctccacttccccacagtcacctccatctgctccgtctcgcctcccattcctcccacggctctcgtgatgttctttgcctctcctgtggaagtttgagttcatgtccattcactggtctgaccaagtaccaggcatagagccaagtgtgagggctcccatcatgggagccctaggacagcacgtggcatctagtagggatgtcattcattcattcattcgttcattcaacgtcccatttttattgagtttatattatgtgccaggcattgttctggattctggggctgcagcagtggaaaacaaacagacaaaacctcctgtcgttatatatcttatattctaagggagagacagataatgatggaggtaaagtcaacctttagggtgttagatagaactgagtgctaaggaggacaaggagttgggggaggggatgggaggggtcagggatccccgtgggaagtagataaggaatctaggaaaagcttccccgagcaggtgacatttgatcacaggtctgaaggaagtaagagatggaggaaagtgcttcagactgtaggaatagcaggcgcagaggccctgaggtgggagtgtggctgtgtgttgatcaagccagtgtgaggtcagcgtggccggggcagagtgggtggcggagaacgtaggagtaagaggtgcagtcgtaggggtatcagggtccccatcccacaggttctgttttttaaaaattatttatttatttatttatttattgaaacagagtcttgctttgtcacccaagctgtagtgcagtggcgtgatcttggcttactgcaacttcggcctcctgggttcaagcgattctcatacctcagcctcccgagtagctggaatcacaggtgtgtgccaccatgcccggctaatttttgtatttttagtagagacagggttttaccatgttggccaggctggtctcgaacttctgacctcaagtgattggcccgcctaggcctcccaaagtgctgggattacagatgtgagccaccatgcctggccagcttctgtgtttgtttttgttttgtttttctttttttgtttttaggcagggttttgctctgtcacccaggctggcgtgcagtggtaagaccatagctcactgcagccttgaacccctgaacccaagccgtcctcttgcctcagcctcccaaatagctagaactacaggcacatgcccccattttttgtagacacagggtctcactatattgcccaggctggtctcaaactcctgggctcaagcaatcctccggcctcagcctcccgatgtgttgggattacagatgtcagccactgcacccggcctcacggcttcttatacatcccagaaagcactttgctttagattcggagatgggagccgttgaaggttcttgagcagaggagtcacacgagctgacttacatttttgcggtatgtttcttgctgctgtgttaacaaatgaccgaggggaaggcaaatgagacaacgagaggctcatctagggtgggggcagcagggtttgggaagttgtttgaattttgagtatattctggagctaccgtgggcaggagttgctgatggagcagttgtaggatatgagagagaagagccaggggcgtctccaaagcagggtttttccaccgcagcatggttgatattttggggtggataattctgtgtggaggggccgtcctatgcattgtaggatgctgagcaacagccttgatctctcctactaggatgccagcagcgcccttcccagtcgtgacaaccaaaattgtaaattgtgtctaaacattgtcagctgtctcctgggggataaaatcgccctgagttgagaatcaccgctctaaggctttggcctgagctcctgagaataggggagccattcataagatgaaacagcagctgttttatttattttctcttatcaaatttattatgaaggagagggaccatgggctcagttttgggcatgttaaatttacgatgcccattaacagataacatctggacagaggtcagcacagtgaaggtcctataaagtgccatatagtaaagatttcaggctttgtggagcagtctctatcacgactactcgtgaaaacgaccaagacagtctgtaagtgagtgtggctgtgttccaatgagacttcatttatggacactaaaatctgaatttcactgggcgcagtggctcacacctgtaatcccagcactttgggaggccaaagcaggcggatcacctgaggtcaggagttcaagaccagcctggccaacatggtgaaaactggtctccactaaaaatacgaaaattagccaggcgtggtggcacgcgcctgtagtcccagctacttggtaggctgaggcaggagaatcgcttgaacccaggaggtggaggttgcagtgagccgagatcgcatcactgcactctagcctgggcaacagagagagactctaagaaaaaaaaacttttttttttgaattccatgtcattttcacatgccacaaaatcatcttcttctttgacattttctcaatcattaaaaacacataaaacccattcttagctggatttggcctgtgagccatagctggctgaccagtgatttaggctgctagagatatgatgtaggaggccagaggctgggctggagatatcagtttgaggggcatcatcatatagatgaatcagatggatggaatcacttagagaagagacagttgggtgcagtggctcacacctataatcccagcactttgggaggccaaggcaggaagatcacttgagcccaggagttcgagaccagccaggggaaaacagtgagaccttgtctctacaaataatttaaaaattagctggaagtgctggtgcgtgcctgtggtcccagctactcaggaggcttaggtgggaggattgcttaaacccaggaagtcgaggctaaagtgagacatgatcataccactacactccagtctgggcgacagggcaagaccccatctcaaaaaaaacaaaaaaaaaaagagagagaagagaccagaacaaatgataaaatgtccttatgtcattgaaggcttaagctttcggccagtctactattaaaatgtgagggagatggccgggcgcggtggctcacgcctgtaattccagcactttgggaggctgagacaggcggatcacgaggtcaggagttcgagaccagcctgaccaacatggtgaaaccctgtctctactaaaaatacaaaaattagccgggcgtggtggcgtgtacctataatcccagctactcgggaggctgaggcaggagaatccctttaaccctggaggtggaggtttgcagtgagctgagatcgtgccactgcactccagcttgggcaacagagtgagactctatctcaaaaaaaaaaaaaaaaaaaaaaagggagggaggtgagaagtcaccaaaggagtggagaaaggagtggccacaggtttggggaaaaacaggtccttggatgtcttggaagccaaaggaagttagcgtttcaaggagaggaggaatgaaggctgactctgttgttgttgtaattgtcattcatttgtcactgaatgcgcacaataaccctgcaaagtaggtactttatttatttatttttattaattttgttttcgagacagattcttgctctgtcacccaggctggagtgcagaggcgcgatctcaacccactgcaacctccacatcccgggttcaagcaattctcccgcctcagcctcctgagtagctgggattacaggtacccaccaccacacccggctaatttttgtacttttagtagagacggggtttcaccatgttgaccaggctgatctcaaactccggcctcaggtgatctgcccgccttggcctcccaaagttctgggattataggtgtaagccaccgcgcccagccggtacttttattattcccattctaaaagaagaagtgaagctcagagaggtgaagtgagttgcccaagatcacacagttaatatgcagtagggtctggatttgtttttgtttctgatttgtttacttttttttttttttttagagatgggtctcaccacattgcccagcctggtctagaactcctgggctcaagcaatcctctcacccccggcctctcaacgcattgggattacaggagtgagccaccctgcccggcccagcatctggatttgaatccaggtgtgtctggttttctaggagaatgaagcaacaaatccacttgctttcagcccatcggggctccaggggtgtagaaacggggtccccctgagtcattgcgtcctgcagccactgtgctcctgggaacccttgggctcaatctccatttccctttggagtgtgtctgagagatgcagtagaatgtaatgactgaaacaagctcggaggctgctctgcctaaggagcggccgttctttattcctttactgtctttaataaacttgctttcagctgggcgcggtggctcacacctgtaatcccagcactttgggaagccgaggcgggtggatcacctgaggccaggagttcgagaccagcctggtcaacatggcgaaaccctgtctctactaaatatacaaaaatattagccagggctggtggcaagcgcctgtaaccccaggtaatcaggaggctggcagggcgcggtggctcatgcctgtaatcccagcactttgggaggccgaggcgggcggatcacgaggtcaggagatcgagaccatcctggctaacacggtgaaaccccatctctactaaaaatacaaaaaattagccaggcgcagtggcgggcgcctgtggtcccagctacttgggaggctgaggcaggagaatcgcttgaacccaggaggcagaggttgcagtgagccgagatggcgccaccgcactacagcctggggaacagagtgagatcccagagtgagaaagaaaaaagaaatataacacaaggatgggccagtggctcacgccttgtaatcccagcactttgggaggctgaggtggacggatcacttgaggtcaggagttcgagtccagcctggcctatatggtgaaaccccgtctctactaaaaatacaaaaattagtcgggcgtagttgtgggtgcttgtagtcccagctactggggaggctgaggcaggagaatcgcttgaacccaggaggcggaggttgctgtgagctgagatggcgccaccgcactacagcctgggcaacagagtgagattccagagtgagaaagaaaaaggaaatataacacaaggatgggccactggctcacccctgtaatcccagcattttgggaggccgaggtgagaggattgcttgagtccaggagttcaagaccagcctgggcaacatagggagaccccgcctgtgtaaaaaattaaaaattagttgggcatggtgatacatgcctgtagtccccactactagggaggctgaggtagaaggattgcttgagcccagaaggtcgaggctgcagtgagctgtgattgtgccactgcactccagcctgggtgatagagcaagaccctatctcaaaaaaaaaaaaaaagaaaagaaaagaaaagaaaaaaagaaatataacatgggtgaccatatatagttaaaatttttaggctgggcacggtggctcacgcctgtaatcccagcactttgggaggccgaggtgggtggatcacgtgaggtcgggagttggagaccagcctggccaacatggtgaaaccccgtctctactaaaaaaacaaaatttagccaggtgcagtggtgggcaactgtaattccagctactcgggaggctgaggcaggagaattgcttgaactcgggaggtggagtttgcagtgagccaagattgtgccactgctctccagcctgggcaacagattgaggccctgtctcaaaaaaaaaaaaagaaaattaaaatttttctagtagctacattaaaataaataaaaaggaacaggtacccagcatagccaagatattatcacttgaacatgtaatcaatataaaaattattaatgaaatattatacatagacactctctctccctttttccccatcctgagtctgaaacccagtaaatattttaccctcacagaacctctccattgccacatttcaagtgttgggagctggaggcatctgcatgggacagcccagcttgtgccccctcctcagggatttcagccacaccccgaggtcttctctcaggactcaagagtctgggcccacagccctatttattagtgccgaccatacagagcccctttgctagcactttgccctgcttattatctcattaagccctcgccactttgccaggggaatgtattattagcaggaatctgatggccagaaaggggaagtggctcagcctggactacccagcatgtgaggggcagagtgggttggatcccagttctccacgtgtccgcactgcaagaaagctgccccttaacccttgcatgcccgggtctgcgctaggcagcccctgggaggagactcagggccatgacatcaccatccatgcacaagaaaaactcatagcttgatcggtggcattaagcataactactgtgaattctgtgcctaacttccttttttttcagacggagtctctctctgtcccccaggctggagtgcgctggagtgcactggcgtgatatcggctcactgcaaactccgctgcctgggttcaagcaattctcctgcctcagcctcctgagtagctgggattacaggcacccatcaccacgctgggctactttttgtatttttcagtagagacagggtttcaccatgttggccaggatggtcttgaactcctgacctcaggtgatctgcccacctcgccctcacaaagtgctgggattacagctgtgagccactgcgcctggtcttctgtgcctttctttcttgcttgctttctttcttttttttttctttcttctcttttcttcttttctttttttttttttttttgagacagagtttcactcttgtcgcccaggctggagtgcaatggtgtgatctctgctcactgaaacctccacctcccaggttcaagcaattctcctgtctcagcctcccgagtagttgggattataggcacctgccaccatgcctggctaatttttgtatttttagaagagacagggtttcaccacattggccaggctggtctcgaactcctgacctcaggtgatccacccgctttggcctcccaaagtgctgggattacaggcgtgagccaccgcgcctgggcttctgtgcctaactttcactgaaatttcactgaagccctctaaagtcacactaccatcctcaatttcccaatgagagagcagaggctcagggacgatccggttccaaaaccacgcagctgggaagtggtacgttgggatgtgtgtccagagagttggattccagagcccacgatcaataacccccacagccaccagactctactgtcttaaatatgctgaactcccaaaccgagctgtgctggaaggaacctctccccatcactcacccccaatagggctttgggcaacttcttcaactccctatgcctccatttcctcatttgtaaagcaaggatgctgtcactgcctacctccgagggtttgtcctagggactgagcaagttattaaccacctgtcaaatgcttggagcagtacctggtgcacggttagtgctcagtcagaactagttattattactgtcaccactaacctgttcagcaatccggtgtgccatgtggtttacatgctcagtctcatttaatcatcacgaatattttgagagaattactatgatcccattcaagaaaggagggaccaggctgggcgcggtggctcatgcctgtaatcccagcactttgggaggctgacgtgggtggatcacctgaggccaggagttcgagaccagcctggctaacatggtgaaaccccatctctacttaacatacaaaaaattagccaggggtggtggcaggtgcccgtaatcccaggtacttgggaggctgaggcaggagaatcatttgaacctgggagggggagtttgcagtgagccgagattgtgccaatgcactccagcctgggaaacagagtgagactctatctcttaaaaaaaataaataaataaaaactggacaagatggcttacccctgtactcccagcactttggaaggccgaggcaggaggatcgcctgaggtcgggagatcgagaccatcctggctaacacagtgaaaccccgtctctactaaaaatacaaaaattagctgggcatggtggcacacgcctgtaatcccagctactcaggagctgaggcaagagaatggcttgaacccaggaggtggaagttgcagtgagccgaaatcgagccattgcactccagcctggtcgacagagtgagactccatcccaaaaaaaaagaaagaaaggagggacattgagcttgtcatcttacctaccacaccatggtggaggtgctgatgggttaagagtttgtatgtgggagttgtatattcattcactcattcactcattcattcgttcattcattttgataattgtagtaaattatacataacataaatttaccatcttcatcatttttaagtatgcatttcagtagtggtaagtgcaaccaatttccagaactcttttcgtcttgcaaaatggaaactcagtacccgttaaataactccacatccccccaccctccagccctggcaactaccatgacactttgtctctatgaatttgattattccaggaatttcatataagtggaatgacacagtatttgtctttttgttactggcttatttcactgagtataatgtcttcaaggtttatctatgtttatagcatgtatcagaatttgcttccctttgaaggctgaataatattccattgtatgtacatagcacatgttgtttatcctttcatctgtcaacgggcactggggtgtttccgctttttggctattgtgaaaaatgctactatgaacacgagtgtatgaatatctatttgagtgcctgcttttaattcttttgggtctatcaccagtactggcattgctggatcatatgatgattctatttgtagtttttgaggaacctcgacactgtttcccatagccactgcaccattttatatttctaccaacagtgcacaaggttccaatttctccacatccttcataacacgtgttattttatttatttatttatttatttaatttatttatttttgagacagagtctcgctctgtcacccaggctggagtgcagtggcatgatcttggctcactgcaacctccacctcctgggttcaagcgattctcctgcctcagcctcccaagtagctgggactataggcacacaccaccatgcccagctaatttttgtatttttagtagagacagggtttcaccatgttggccaggatggtctcgatctcttgaccacgtgatccgcccacctcggcctctcaaagtgctgggattactgacgtgagctaccgcacccagcctattttattttatttttttatttatttagagatggaatcttgctctgtcaccaggctggagtgcagtggcgctatcttggctcactgcaacctccacctcccggcttcaagtgattctcctgcctcagcctccctagtagctgggactacaggtgcacaccaccatgcccagctaatttttgtgtttttagtagagacggggtttcactatgttggccaggatggtctcgattctcttgaccttgtgatccacccacctcagcctcccaaaatgctgggatcacaggcgtgagctcctgcgcctggcctattttgcttatttttaatagtaaccatactaacgaatatgaggtggtatctcactgtggttttgattgcatttccccaatgattagtgaaattgagcatcttttcatgtgcttgtggacccattcaatcattctttttttttcttttttgagactgagtctcgctctctcgcccaggctggagtgcagtggcgcgatctcagcgcgctgcaacctcctcttcccagattcaagcaattcacctgcctcaggctcccaagtagctgggactacaagcgtatgcccccacacccggctaacttttgtatttttagtagtgatggggttttaccatgttggccaggctggtctcaaactcctgacctcaggtgatccacccacttggtctcccaaatggctacgattacagacgtgagccaccacacctggcccattcaaccattctctcattaaaaatacttattaagcactcaatatgcactaggcactgttctagatgctggtaatacagtgtcgaacagcccagatgctcacattcatgatgtgtgtttgagttttgttgccaccatcagctgcgaaatgatgacccttttctgtttctcagtttccacgtttgggtaatgggtgctatacatcagctgctatcaaccgagtacttaattgtgttcaaggccaagtgctaaatctccacctagacccaatccctcatatcagtcccatgaggtaggtcctgttctctgcattttataggtggggaaactgaagcaagctggcctatgtaacaccagcaaggacacagaataaggaagtggtggaggccagcgcagtggctcatgcctgtagtcccagcacttttggaggctgaggcgggcggatcacttgaagtcaggagttcaagaccagcctgggcaaagtgggcaacatggggaaaccctgtctatacagaaaatgcaatatttagctgggcatggtggcgcaagcctgtagtcccagctactcaggaggctgaggcaggaggaccacttgagcccaggaggtggaggttgcagtgagccgagattgtgccactgcactccaaacttgggcaacagagggagaccctgtctcaaagaataaaaaaaatggagacgttccaatacctaacatttggctgccacagcacacaaaccacatgatctatttcataggactcttgggagcatcaaatgagttggcccacctagcaagcaccaaacgcacattagctcttgccagtattactcactcccttatattaattcttcccagttcctcctttatccctattctttcccctactttcctttgctggtcatggtctgcctgtgatctcaccttctgctatgcttatattcattcattaattcattcattcattcttcattcaaccctcatttctttctctctctcttttttttttcttttgagacggagtctcgctttgtcacccaggctggagtgtaatggtgcagccttggctcactgcaacctccacctcctgggttcaagtggttctcctgcctcagcctcccgagtagctgggattacaggcacccgccaccatgcccagctaatttttgtatttttagtagagatagggtttcaccatgttggtcaggctggtcttgaactcccgacctcaagtgatccacccgccttggcctcccaaagtgcagggattacaggtgtgagccaccgtgcccggcctcagcccttatttcttgaggtctcccgtgtgccaggcctactgccaagaaatgctgggacacacagaggaatcggactcccatgccctaccccctccaggaactctcagcttaccgaggacgaagaagatcatctaccaactaatgcatgtcctacggggcacctcagagcaggaaactgacccaagttcggtgggaggaatgagtgtgcatgtgtgtctgtgtgtgtctagggaaagcctcctcaagaaggtgcctcctgagctgcctgctgcaggtaaagtactacatcagcaaagaatgtgagctggaatgttccacagcatgggcagaggtctgcagaactggacagagctgggcagttgaggaaactacattgtttatacttatatttttaatttttttctccagctatgtgctagaggtggtaaaacattaactgttcccaaggatgagaaaatagctgaggatgagcatcttaggaggggaaggagatgaggatgcatgacccctagaggcatactccacccctcacacacctctgcttgcttcaactactccatttctctccagaaggttccaggttccctgcagaaagagactggaacctctctctccccatccccacaggactagagactacaactcccatgatccactgcggctgctcttctcacaactggactccagacttcacggggtctcatgggaaatgtagtcctcatcggcttccgcatcactttccttgttttttttcccacgcatttccagacttttcaaccaattgagaggtgggaagcgccttgctattattgaagccaacaacaccctctttcttacagaggtgggagccggaagtccagagtgctggagcaacttagcgcagcttacaggaccaaggtcctgtagccttgcagtgagtgctgcaaggatgttagactttgggtttttttccttgcttttcttcttttctttaacaggcggggaaacagaccagagaagttgaaagtttgtcccatatcacgagtcgggctcaggagccaggacttgcggtctcccaagcagcccagagagagaaggggtttggggaagggaagggtcggttgtcagtggggttgccccgcccccaaccctgaagtatccgcccccaccactgccctccccgctcctccagggttgaaaagaggcgtctgcgtgaagatcaatcatttcccggaggacacggactacgaccacgacagcgcggagtatctactccgtacgtgggggtccgggacagacgtggggagtgggtcaaatcgcggggcctggaaggcgtcggggtgggtgccgggaaaaggcactgggactccggcacttggatcgacacgccgaggttagcctcccagccaatccgagtccagatagtgagatcctctggtccccgattggctgactgatctcgttcccgccccctcctctcaccttggggcgggctgagggaggatcctgggcgctaattggccgctttgctctctttggccctcgcggcgactctgcgccgtgactggttgtggaatcccggactgggattggccaccgcgccgcagagctgtggggcaatctgcggcggtgacgggccactactgggagccggctgggaaagcctgtattgccattggtagctaccccgagaacgcggcaaatcctaaatgatgattggctgcggcctcagccaggttccgaaatcgcaaaatctagttgcctggggttttaggggtgggtggaaaggaaggactgcagagaaaaagaggagggcggggcggggagtgggggcggggagagagagataaggggaagaagggagggaggaaaagagggagaaagagagatagacgaagtcaggcctaaagggggtagggagggagggaaggaggaagggagaggaagggagtgaagagaagagaaacctggaagattgaagaaaccaggcagaaaaggaggggagagagagacccaggaagatagaggaggccaggcgaaaaaaggggtggggtggggtggggtggggaaagacctaggaagacagatgaggccaggcagaaaaaaaaagaggggggagagacctaggaagataggtgaagccagacagaaaaagttgtgggtgggggtggctaggaagacagatgaggccagggagaaaaagtgggagagagacttaggaagacagatgaggccaggcagaaaaagcggggtggggggggacctatgaagacatacgaggccaagcagataagaggagagaggggagacagagccagaaagatagatgaagccagcaataaaactgggtggggtgggggcgtgaggagaagaagggaagagaaactcagaagtagattcagcctggcagaaacgggaggaggaggaggaaggaaggaatgtagagagagagagaaacccagatagatgaagcgaggcagaaaatgggagggggtgtggagagaggtagtaagtgatttgcgggatatggagaaagaaattcgcagacgagaggaaggaagggacgagaaagagaaagggagaggatccatggagaagttgggagaaaaacagggagagtgatttcgataaataaagagggggaaagatattccaagagagagaaaaatagtccgaagaaaaaagaaaaggacaaagaaaaagagggagagaaaatcagaccgagaaatagagaaattttaaaaacaggagagagaatgaggcaacagtaaaataaaccagaacacagccggagagagagaatcacagaactgtcgggaggcgccgcgagatggggggccgggaagggggcgcaggcggccgcgtctgaccgccctcgctctccctccttttcctttccttcctcccccgcaggagttgtccgggcctccagcatcttccccatccttagcgccatcctgctgctgctcgggggtgtgtgcgtggcggcctcccgcgtctacaagtccaagaggaacatcattctgggcgcagggatcctgttcgtggcagcaggtgagaggcagagggagggggcgaccggggcggcccacctgggcgcgcacgtgtgtgtgtgtgtgtgtgtgtgtgtgtgcgcgcgcgcgcgtgagtgcaagtgcgcgttcgtgtgtctgcaaagccaccttgccccgagcacccccgggggcccggagccttcctaggcggtccccaagctccatcgccacccgctgggtaaggtgggtgtagttctcgcgtcgccttcggaggagtaaaccgacacaggcaggtgtctggcgcgtaagacgccgggcgcttaggatcccaagcccgccgtcctggagacggaaggggaggagctggggagggggtgggaccttgagacacaattgggctcttgaggatagagaggcggggctgggtcttggagggcgggcccaggagaggtagaaagtgatctgagcgccgatgaggagcctgctttaaggggcgggcctttggagactttggtggatccaagagggggctggtcctgggaaaccgtccagggccgggaagtggaaactaaaggggctgggtaagggagactgaatcggcccttgcccgtggccatttggagaaggagaggctagaaaagacggggcgatgcctggaaaagccaaagggggaggggttatgtccttaagggcacagagaatcaacctggctgattgaagcaagaggccgaccaaagccagtcagtacctgggattggccgtctcaagagctagggcctagacgagcagagagctaggactggaacacttaagaggcacgcaattaaggggtaaggccccctttctaccccgtatgagtagcattgggaaattccaggggcagagcttttttggaggagtagaatacagagaagagggagggctttgcatatttgaagagcagggtgtgctttggggatgggtctagatctgcaaggggtggggcttggaggatctgaaaggccggagtagctggacctgagaccggcaaggacccgagaccggcaaggaccctggccaagatccgcacggggcggggtttggtaagctggaggtggggcctagagtagaaggcggggcctgctttattaaaggcaaatttttgaccagtaggggagggcctagaatggatactccggcaggaattatatgaagagagattagataagtgaaaggcagggcctgatcacagcaggatgacatcattaacagagttcaaaggagcagagggatgaggcttgggaaaaacccaggtttataacgttaagggtggaggtagactaactagggcagggcctggaaactcatctcatcaaaggtgggttttagaccagtcagggcagggcctggactcgctgggagtggggcttaggccacctaggggtggggcctggaccgcttggggtggagttaccaccagccagggtggggtttagaccagcagagttgggaccttagctagaggagtggggtttatgccatgtgggggcagcccagaccatctgggggtgggtcctagaccacctggggcagagtttagaccagccagggctgggttagaccggcagaggtgggccgtgggctatctgggggcaggacctggaccatccagggccgtgtctggaccattcagggcagggcctggaccacctgggggtggaatttagaccatctgagggggtgcttgagcctgcctgggccaggaccacgcatgatgcagtctggaccattggcggccctacaccacctgggggatggagtttcgaccagccggggttggattagaccagcagaggtgaggcctgggccagctaagagtgggccggagccctctgggttggagcttagaccagcagggaagcgcctagagcatcgggcggggagttgtgttcacttctggcaggacttgggtcagccagatccaggacgggggtctagaccactcggggtggggcctagaccgcctgggggtggcgcctgggcccgctggcgcaggcgggcaggggtcggggccgggggcgggggcggggccgggggtggcctcgaggctcccgtctgaccgtccccgcccaggcctgagcaacatcatcggcgtgatcgtgtacatctccgccaacgcgggcgagccgggcccgaagcgggacgaggagaagaaaaaccactactcgtacggctggtccttctacttcggcgggctgtcgttcatcctggccgaggtgataggcgtgctggccgtcaacatctacatcgagcgcagccgcgaggcgcactgccagtctcgctcggacctgctcaaggccggcgggggcgcgggcggcagtggcgggagcggcccctcggccatcctccgtctgcccagttaccgcttccgctaccgccgccgctcccgctctagctcccgctccagcgagccgtcgccgtcgcgggacgcgtctcccggcggccccgggggcccgggctttgcctccacggacatctccatgtacacgctcagccgcgacccctccaagggcagcgtggccgcggggctggcgggggccggcggcggcggcggcggcgccgtgggggcgttcggcggcgcggccgggggcgccgggggcggcggcggaggcggcggcggggcgggtgccgagcgggaccgcgggggggcgtccggcttcctcacgctgcacaacgccttccccaaggaggcgggcggcggcgtcacggtcacggtcaccgggccgcccgccccgcccgcgcccgcgccacccgcgccctctgcgcccgcccccgggaccctggccaaggaggccgccgcctccaacaccaacacgctcaacaggaaaaccacgcctgtgtaggggcgcggcgggggagccgaggggcgtgtccggggcgcgtgcgcgggcgcgcgtgcatcgaggctgccggggtcgggggcgcccccgctttcccccgtgagcgcgctggagactgctgggcccgccccacgcccaccctccccgcccccctccccctccgaagcagggaccccgagggagggggcaggggagggagggggccgctgtgagggagcgtcgtgttttatttttttgggggatctatggggaggggggagggccatggtgttttttgcagtttcgagatgttttctttttcatgttttgctgtgtgcatggggggcggggcggggggaggggagggagggactcccagcccagcccaactcctggagaggggcccataatacacgaatacatagttacacccacaaactatatatatgccctatataaagagacacagcgaagggatgcagaaaggcagaaagaagggttggacgcgggcattcattcatttttttcattcattattccacaagggcttattaagcacctactgtgtaccaggcactggtacataagaaggcattggagcaggggacacgaacgaggcacagaaagggccttctcattcattcattcattaccggcaatttatttgtgcgccttaaaaagctaggcattgtgctccgtgctcagcgtgcaggaggcaggaaaacagccaggggccccgacgtctcatagagtaaacatcttgtgcatgagacaggcattaatcgatcatgtacatacacaataaattacagttaggctataggagaaacgagatgctatgaaatgctccatcaggggagcctaacccagttgtgaggaagagatttcagtggacagtgaaaggatgagaagaagccagcagggcggagctggggcaggagtgtggcaggcagagcagcacgtgcaaaggccccggggcaggaaggagcttgcagcgagggctgaagggtagtgaggcaggtgagcggggatcaaggtgaggccggagacacagacagggccagattgtgcaggggctcgtaggtcaggagttcagattttattctaggagtggtgagggccgtggaacgggtttaagcaggacgctaacgtgaatggtgtacaaagggaagacaggaactcggaggcaagagtaggaggcagagatgtgctgaaatacagcatcaaacatgggcacgggcccttggagctcacactcttgtgggaggaagcacgtaattacacagatgctgaagcatagtcatggtgtctggtgtgcaggagaaagccgtggggcttagagactcatgtgtctgtcactcgttcattcagccactcacccattgccatttttggccatctgctaaggtaccaggaagtgtgttaggatccagatccccaggggtgaaacagactctagccctgctctcaagcagtttattgtcatcaaacaccgccatccaggcagggcaatcggtgctggaacccggaccaccgtgggtaccgtggcacacggtggacagagtgaccaactgccaggagtgagcagcacttggggtaggcttcctggagaatatgatgcccattctgggtcttgaagaaatgagtgggcatcttctggttgatgaaaggcatgagaaaggcttgtggggccaaagaacaacttgggtgaaaacgggaggaagtgaacgagcatgatgtattggggtcagtgctaacagttctgggatgctgatgtacaaggtggggctgggagatgaggccgggaaagtagccacaagctagagtgtaaaggtaccagggtggccgggcgcggtggctcatgcctgtaatcccagcgctttgggaggctgaggctggagtatcacttgagcccaggagtttgagaccagcctggataacatggcgaaaccctgtctctacaaaacattaaaaaaaattagccgggcgtggtggagcacacctgtggacacagctactcaggaggctgagggaggaggaccatttgactccaagagttcgaggctgcagtgagctaggatcgcggcactacactccagcctgagcaacagactgagatcctgtctcagaaaaaaagagaaaaaggtgcctgagttccaggcagagggactgaggctcttctaaggatggtgagagaggatgacagctgcgcgggggcaagggctgtgcggtgattggaggggatgggtttgaagttcactgagaaggcagaggggacagcgcccagtaggcttcccttccatatttgctcagcaagtgtttcctgaggcctcccccgaagccttgtgctgggcggtgctgggagtggagaggtgattttgatcttgccctgctctcaaggggctcccagtctggcgggaaaacaggcacagacgcagcttgaggaggacgtggcagcggtggtgccatgctgccaggggctctgcgtgcccttctcttgacggaagggtacagatcagagctgggtgttcagaatttctctccgaggcctgtgtggaaggaccaggaagagagagactgaaggtccctaggaagaattctgccaaggcggtttcaggaagagatgctgggaaatgtaggaaaaggaatacaaatcagtgagacggagaagcgctgagtgagagagacggatacgtggagagaagagggatgccggagcgggtgttaaaagagacaaatctggccgggtgctgtggctcctaatcccagcactttgggagactgaggcaggcagattgagctcaggagttccagaccagccaacatattgaaatcttgtctctaccaaaaatacaaaaattagccgggtgtggtggtgcacgcctgtagtcccggctactcaggaggctgaggtgaaaggatctcgcttgggcctgggagggtgaggctgcagtgacccgtgatggcaccactgcgctccagcctgggcgaaagagcgagactctgtctcaaaaaaaaaaaaaaaattgagagacagcaaatatttgctggaagagggagagggaactggttaggggagaatggattctagagtctgaaggccaaacagaacgagagagagagagagagagagagaaagaatgaggttgagggtaggcaggaggaagagcaagatggggagggagggggagagcaggagagaccaaactagtagagtcacagacagagaaaaagtcaaagacaggaaggtgatacagaggagagagaagaggaagaggagagactgacaggtgcacaaatcagagaagtcccagagatagcagaaacacacacagagacagagatagagagggagaggtaagccggagacagactcagagattcgcacaaaaagcaacgtggagactcagaagcaagcgcagcgtcaaggaatgctccatttctggtgtgttgttttcccagtattcaagaaatatttattgagtgccaacctgttctagacccaatctcggccaggggatgtggtggcaaatagacggacaagggcctgctctcctgaaacacactggagagataaacaataaataatatcatttcagtaaccaaaaagtgctttaaaaattaagctgaaggccgggcgcagtggctcatgcctgtaatcccagcactttgggaggccgaggctggtggatcacttgaggtcaggagttcgagaccagcctggtcaacatggtgaaacttcatctctaccaataaataaataaagtagctgggtgtgctggtgtgcctgtagtcccagctacttgggaggctgagaaagaaggatcacttgaacccaggaggcagaggttgcagtgagctgagatcgcgccactgcactccagcctgggcgacagtgagtggtaacagaatgacagagcaaggatgactttagatgaggtccttggagtagaccttgtggcagaggtcacagagatgtggattgtgagtaggaaagagaggtgagaaagtctgggggccaggcattccacccaccagaggcagccccaaagcccagaaaagtagcaggtcttcgaggaggcctgtgcggtgagcagatccaccataggacagaggcacagggtaggggctgatcagttagggccttggatccttgggaagaaatctgaattttattctagatctgatgggaagtgcttggagggttttgagcacaggcatgccatgatcatatttttattttcttatttatatttattttgaaaaagagtcttgctctgtctcaggctggagtccagtgggctgatctcggctcactgccaacctccgcctcccaagttcaagtgattctcctgcctcagcctcctgagtagctgggattacaggcatgtgccaccacgcctggctaatttttttgtatttttagtaaagacgggatttcaccgtgttggccaggccaatctgaaattcctggcttcaaatgatccacctgcctcggcctcccaaaatgctgggattacaggagtgagccactgcgcccggcctcatatttttatttaaacaagaacagcagaattacattgctgtgctgagcatacgtagacttcaggagtcaaaggggaaggaaggaggtagcgggctgttgccttcctctggttgctggaggcctggaccaaggtggagttagtgggatggaggaagtggaagaaggcatgggattttggaggctagagcctgcattggtggtgaactggatgtcatagaggagggaaggaaaaggaaccaggaagagaagaactctctgaattgggcacgcacatctctgatgggcaccgatgaggattgttaccaggaacgaggagactgggatcaggaaagtggctttgggagggaggaaccaaggcttctcttttggatgtgtcaagatagatctgccttcgagaaatccgagttgtggtatcaaatagccagttggatatgtgagactggagtttgggggaaagagaggccgtggctcaaaaacgtaagttttggaaacgtcaacataaagccacaggattgggtgacgtggcctagcaggggggtggggacagagaagcgaccctggccagagccttggggacatctacatctgggggagaaggggatgtagcaaaacgagcttaggagtgatctcgaggtaggctgaaaccaggagggttacagagggcaaatgcacctttgtgtttcaagaaggagaggagacagccagctgtgccaagggctgctgagacttggacaaggatgcagagagcagagtgaccattaggtctgatgacatggacagggttggtgatcttgataagataagatgtcagttcagtgcagtggtggggacagaagccctgctggagtggaggggagagagaatttggggggaagacagaaggaaagggaattcaggcaagtgtgtgtgtgtgtgtgtgtgtgtgtgtgtgtgtaactgacacaaaggccaggtgcgatggctcacgtgtgtaatcccagcactttgggaggccgaagtgggtggatcacttgaggtcaggagttcgagaccagcctggccaatatggtgaaaccccgtctctactaaaaatacagaaattagacaggtgcggtggtgcacacctgtaatcccagctacttgagaggctgaagcaggagaatctcttgggcccaggaggcagaggttgcagtgagccaagatcacaccactgcactctagcctgggtgacagagcaagactctgtctcaaaaaagaaaaaaggtaaaaaaaaaaaaaaatgaccctgaaaggaagtagggagacatgcagatagggagatgggaggcagaaaattgcatcctgcaattagctgtcacagcaggcaggagcaagagagatggggaagcccagggccaggaggggaagatgaattcagggggcagggaagagaggatgctgtcagctaggctctggcagatcccctagccagggatgctctgcccagctcctgtctcttgctgctgtcagcgccgggcacactctgggattccccctgtagaccctgtcaagacctattgaggtgaaggggaagaacacgttttcatcattcattttcagaaataaacattcactcagttcttggaaatactttctggccaggcttgggggctcatgcctgtaatcccagcactctgggaggccaagacaggaggattgcttgaggcttggcgtttgagaccagcctgggcaatatagtaagaccccgtctctacaaaaatgaaaaatgagctgtggcgtggtggctcacgcctgtagtcctagatactcgggaggctgaggcgggaggattgcttgagtccaggagtttaaggttgcagtgagctatgattgcaccattgcacttcaggctgggccacagagcaagaccctgtctcagaaaacagaaagaaagaaagtcaaagaaataaagtcaaagacaagaaggtgatacagagaagacagaaaaggaggaggagagagactgacaggtacacaaatcagagaagtcccagagataacaaaaacacaaccacagagatagggagacgtaagccggagaaagacccagagattcgcatagaaagcaacgtggagactcagaagcaagcacagcatcaaggaatgatcaataaaaagaaaaaaaaatatttcctgaggacttccaagtacaaggccctgcaatctcaggccacttctgtcccatctctgccttcagagggggggacaggtagtccagacaattagaatacagagggggctgtgttctgacggggccacgcgggcattgaggaaacgcagcaggcccctcccctagctggggcggggatgtctgtgtgccatcatctcactccatctggtcattcctttgcccattcatccatccattcattcaagtcaccccatgcacattttccaagactgcctgtgacctggccctgtgccgggtagagctgaggatgccaaggtgaattcctcctgtgcctggccccggccccagtctgctggaagaaccagacacagacaatcacactgcggggaaacacgtgctccatcggaaaagtccagagcagggggtgggcagagaggcccagcgtgcaccagagcctcgctcaggtcagcgccaggcctgcctggagcagccaactgtgggagaagaaggagttggtgaaaggtgggtcccacctgggccgtccacagaagggctgaggggtagggggtgaggggttgaagatcaggccctgccgccatgccacacggctgtcctctgtccctgctcctgggggagctgaaactgcatggaaggtcccccaggggtgccccgtctaataaactcgatgaagaggagtgctgctttcattctgtgcccctgacagccggccctgccctgaggcctgcgctttctccaacatggaaatcaggccttccatccttcaagacccagggttctggccccagtctcctccctgaggcccaggactctgggtctgccaacgccttgaccaggagtccaggctccccggccctcctcctccctcagacccaggagtccaggcccagcccctcctccctcagatccaggagtccaggccccctgccccctcctccctcagacccaggagtccaggcccaggccttcctccctcagacccaggagcccaggcccccagcccctcctccctcagacccaggagcccaggcccccagcccctcctccctcagacccaggagcccaggcccccagcccctcctccctcagacccaggagtccaggcccccagcccctcctccttcagacccaggagttcaggccccagtccctcctccctcagacccagaagtccaggcccccagcccctcctccctcagactcaggagcccaggcccccagcccctcctccctcagacccaggagtccaggccccagcccctcctccctcagacccaggagtccagacccccagcccctcctccctcagacccaggagcccaggcccccaacccctcctccctcagacccaggagtccaggcccccagcccctcctccctcagacccaggagtccaggcccccagcccctcctccttcagacccaggagttcaggccccagtccctcctccctcagacccagaagtccaggccccagtccctcctccctcagactcaggagcccaggcccagcccctcctccctcagacccaggagtccagaccccagcccctcctccctcagacccaggagttcaggcccccagcccctcctccctcagactcaggagcccaggacctaggagaccaggttcctctcctctcagatccaagattctgggtacccaggccttcttcctctaccactcagaagtggggtaccgaggcttcttctcccttagggacccaagactcctggcctcaggccctcctccctgagacccggggccctgcctcccgcccctcctccctggtaaccccagtcagacttgctgccccgcccgtctcctgctgcccgggagactgcggagctgggactctcggcgccgctcttgccccttagtgaaatgaaagtcccatcaggctcggccccttcctccccgggcggcctccctccccccttcctcgtccccttaaaacacccgggatccctatggcaacaggcgccgggcgacaggtgcgggtgttatttacgggtcaagcccgaaatagccccgagggtggagggtggagggtggggggtgggcgggtggggacgaggccgggcgcgggcggaggccaggccggtggcggtggcgggcacagccggacgcttcggaggcagcgcggagctggggtcggcgcggggccgaggcaggagagcgagaggggcccctgctcgggagtcgggggtgggagccccgagggggggccctggcctggggctgagcctggcgcgaacccgaccgggaaggccctgggagcccgggggagggagacggactgatcccgaaggggcgcagcgtctcttgcgggtcgcggttggcctttgaaccctggggggactcagtcctggttttccgagccgcagtgcggaccacagccccatagtgtgagccccaggagggcccccggtcccatctgccccagccctcggggaggccccgtagcctcccgcctctggactccactctgtcttccggccaccggccccttttccaggctcagtagagacctcggatcttttctgaatggcaggggagacccctatccccttttcctgaattccagcgaggcccagtcctcttctgagccccagccagggctctgttcttctccttctgtggatgccggggtcctactgcctctcttgagacccggattgaattccgacctccccttgggagcttcccgggaccccaggtcttccttttccgaatcccagagggtccccaagtcctctgttctcaaactctgagcccaagggaaccccggccacatctcctccaaacacacacaggacctcaggtcccttcctgggtaccccaaactcttagccctagtggggtgctcagatctctcaggaaaaccagtttcccttttgttaaccccccagcggggaccccaaagcagccccttggagctgcagggagcttcagcgggcaccagttctcattcctctggagctcttggggggactccctcctgggaagccgaattctatctctaaacctcagggtgggggccttgtttttcctctgggccccgtcttctttgccaagttcttgagggcaacctagaccctcctctgaaccccagaggcttccccagccctggggatcatttttctcttctgaaccccagaagcaatctcgactttcgcatttgagattccagacaggactcggctctccctctttcatacccaggggaaactgagtccctcacccccttcaagaccccaggccgctcctcgctcccgcccctcgaggcccttcgccggctctgcctcctcccccttcccgaccccaccggccataagatgatgtggtccaacttcttcctgcaagaggagaaccggcggcggggggccgcgggccggcggcgggcgcacgggcagggcaggtcggggctgacgcccgagcgcgaggggaaggtgaagctggcgctgctgctggccgccgtgggcgccacgctggcggtgctgtccgtgggcaccgagttctgggtggagctcaacacctacaaggccaacggcagcgccgtgtgcgaagcggcccacctggggctgtggaaggcgtgcaccaagcggctgtggcaggcggacgtgcccgtggacagggacacctgcggccccgcggagctgcccggaggtgagcagccgccgccccgagcgcagggcttgcgtcccacggacagggagggagaggggcccgtgtccgaggagaaaacccgccccagggacaaaagcctgagcccggaggagacagcttgcctcgcagtaagcgccagtgcccacttcgtcctctgctctcagaaactgctgagagatagagggatcccccagatatggcccaggtccctcacgggcctaccgccagagaacctgtgccttagagcttgctttcctgctacagactgtaccccaagaccagaatgtgcctacagggagtctgtgcccccaggccatcctgtacccccagaccaggctgtgacctgagaccccctcagacgagtctgtacccctattctgcacctctaaagagagcttgtgcccccgcctacagcctgtgccccaagaccatcctgtaccccgactatcctgtacccccagatgagcctgtgtccccagctacagtttccacccccagactaacatgcacccctagaccagtctatacccccagaccagcctgcatccttacaccagcctgtgccctcagatcagcctgcacctccacaccaggctatggtcccagatgattctatgacccccaaagtccctgcccccacacagccaatgttcccaggcatcgctgtgtccccccagaccagcctacagctctagagagagcctgtgtcactagaaaaatcttgcctgtgtccccagacccagcctgtgattccagacacagctggtgtcctcagatagcctgtgcccaccccagacagcctgcaccctctggaagtgcctgtgccctggagacagcccgtgcccactctgcatgtgcccacagacagcctgtgcccatggagagacagcctgggttcctggtgtcagcttcctcttcccagcctggagacagcttgcgctcccatcctgtgagccctggggagacagacgcccaccccaaagcaggatctatgcctgttccccacctactgcttccaccaaaccaagctctcaccagacgcctcccaacacccgagggcagaccttgttccttccctgcaatgttcttcacttcctgtcctctcgcctccaaatgcccagactggacatttcagcgtttctcattttctccgagagacattcccatactccctcctttcccaaatcatggctgttttatccctgggcatggcagagagctgttccatacctccctgacacgccacgccacggcttgtgcttataccagggggacattctataccccttgggaactggatgaaatctccttctacctccactgacccatggaaaatacctggcactcctcagagcccatttgggctgtcatatatttgatcacccatatgagatctccagcactcttcagtctccaaagacggtcctatcatcccagtgcccctcaaagaatatggcctatttttctgggctccgtatgagatttccctcgtccctcacttctccagatgtgatatcttatatgtgtagagtgcaaaataggatgtcccaagccctcgataggacagtgggatgccaggccccccggctgtctgagctacccacttggtgtccagatgggctacccttgatcattttatttctgcagatgggctgtctctggcccctcaggggtctcataaaggatgatctcaaacttttgcaaaatgggagtccccagtaataagaatagtagctgcttatgtaatgcctggttctcatctcagtgttttatgtacattaactcatcaagcatcatagctagcctatgagtcgttattatcactcccgttctagagaagagaaaaatgagggggcgagaaatctcggtggctcggtctatgcacccaggctagttagatggaatttgaagcttggttgcctctcttctcaacaactgcattatatcacatctcactggtccatcaagagatcccaaaggtcaaaggtcctgggacaatggaggggtggcccatcccatctcaccgcattgtatggggttccttgcatcccttgctgtcccctccattgatcagaaaggacttcagtcttccagcagggccattaacgttatcttacaaacccaacccctcagaggacatctctcaatcttcattatctcagagaaatatctcacactcaccactgcccatcaaaaggcatccctggctcccttggctataagtatggaatgtgggggtgacccttaccctgcacttttccagatgggatgtgtcatgtttgggggtggtcgaattgggatgtgctaaactattagtagccaaaagaggatgccaggcaacctacattgtcccagaagggccgtcacacttcccttgtggatgtagaccgtgtttcccgcaatgactgcttcaaagagcacctgcacccttcgctcagtgacgtgaagcaccctttacctctttttctttgaaatggagttttgctcttgttgccccggctggagtgcaatggcacgatctcggcccactgcaacctctgcctccaaggttcaagcaattctcctgcctctgtctcccaagtagctgggattacaggcatgcaccacaacatccggctaatttttgtatttttagtagagacggggtttcaccatgttgacgaggctggtctcaaactcctgacctcaggtgatctgcccgcctcggcctcccaaagtgctgggatgacaggcatgagccaccacgcgcagcccagcatcctctacctcttgctgctgcataagaactcacatatcccactcctcctggccggacatctcaccccttcacctcccctcggggtacttggggagcgcccgcccacaccacctcacctgactcagggattgatttcttgtcccttcatatccttgttcaaattgaaaagttcaatttttcacattcatggactgcctggtccctcttctatggcctttactcctgttattctcgacctctcttctctctttctgtgcctcagtttccccatctgtagaataagagagtaggtcaggctaggtgaattctgagggaatttctgggtctaaaatgcacttcagaaagtgctcccctcccttccttcatttctccttccttctctccctttcttcctttttctgtctttcttaactttaaaatttctctctctctctttttttttttgagatgtagtcttgctctgtcacccatgctggattgcagtggtgccatctcagctcactgcaacctctgcttcccgggttcaagcgactctcctgcctcagcctcctgagtagctgggattacaggcatgtgccaccactcccggctaatttttgtacttttagtagagatggggtttcaccatattgacaaggctggtctcgaactcctgaccccaagtgatctgcctgccttggcctcccaatgtgttgggattacaggcatgagccagcacacccggccctgtgctttgttttatattattttttcctcgttcttttccagctcatctctttaatgtgtttgatatacactcacagatatgtattttgacttggaaaatatatagtgttagtttatatgtgtgttttacataaatgagatcatgctattgattttgtctgatctttgggatttttttttttttttttttttttgagatgggatctcactctatcacccaggctggagtgcagtagtacaatcttggctcactgcaacctctgcctcccaggctgaagggatcctcttgcctcagcctcccgagtagctgggattacaggtgtgtgctgccacacccagctgattttttgtatttttggtacagacggggtttcaccacgttggccaggctggtctcaaactcctgagctcaagtgattctcctgcctcggcctcccaaagtgcagggattacaggtgtgagccacctttcctggcctcaatttttggatttttaaattaaattattaatattaattatcattattgttttgatcaacactgtgtttctcaaatctctccatcttgctttaggttattctaattcatggctatatgtactggagagattttcacaaggactgtctgtgtcatttacttgtctgttccccattagatggacacctgacttgattctgactccatgttacttataaacagtgctgctgtaaacatctgcatatatattcctgttttgttttttttttctggagttataccctgcaatgaaattgttgagccacaggctatgaacattcttcatttcataaagtacctcagagtgccttcccaaaagactaggagtacccgttcatacacggtgtttcctcttatcttttcaaacgcttgatatgacccttttaatgttggccaatctaattgatgggaagtggtggctccctgctgattccggctgcctctctctgatccctggtgaagtggggcatctctccatggacttatgagttacccaggcttcctcttttgtgaattactattcataccctttgcccatttgtcaactgggttctctctctcttcttgctaatccgcaggagctctttgtgtgttctaggtaggaatccttcctgagacaggattcctttctgagtctgttagtcttctgctacttgtatcttggtatcctttgttgaatcaagtgattatccatatgtaatcccacttgaccctcaacaaacccatacgaaggggccaggaaagagattattatctcgttttaaagaggaggaactagagacccagagaggctaatggcgcacttggggccacaggtctggggctcagagccccgggtaggagtcccagctcctagatggcagtgtggtcgcaggtggctttcacacctctgggcatcatttttctcctctgtgtatcagggatgctgatgtccaagttttaggctcccgtgggctgttaactgtccagccctgagcttacgcaagggacctcacatcctcatgtctgttttctctctcctgctcccacagaagcaaactgcacctattttaaattcttcaccacgggggagaatgcacgcatctttcagagaaccacaaagaaaggtgagaacttttcaccccctgctgggtgacaggtgggggaaatgctgagcgtgctggaggagttctagagagagttatcccctcctctgctttaccccagggcaggtctcgtgtctataatctgtggctgtcccctggggagtgctggcgggagagttaatgatggggacatggtgctctagagaatctagagaactcttttttttttttttttttgagatgatgtcttgctctgtcacccaggctggagtgcagtggcacaatctcggctcactgcaacctccgcctcccaggttcaagcaattcacctacctcagcctcctgagtagctgagactataggcgcccaccatcatgcccagctaatttttatatttttagtagagatggggtttcaccatgttgaccaggctggtcttgaactcctgacctcaggtgatccctctcctcagcctcccaaagtgctgggatgacaggcgtgagccactgcacctagctgtgcctagagctcttaccccatctctgcctatgccacgttctgtgtcaccccgggcaagtcgcagcccctctctgtgggtagcacttggacatctcacaaacctgcaggcatcaagtactgaccacagtgctgggcactccatctgtaagatctccagtcctcgcagtagccctgcagggtgggggctttatcttccatcttccagaagtccaggaatggttacaattattcttcccaggaaaatttttcaccatgttggccagcctggtcttgaactctcctgatctcaagtgatccacccaccttggcctcccaaagtgctgggattataggtgtgagccaccgcacctggtccacaggaggaaatttaggctgagaagggttcagcctaaattcctactggaatctggaaaatcctactagaatcttccatgtaggaagtagttggtgagatttccaacctggatcattccactgtagcacactgcctttgccatcgtctcccacacaccccactgcctcagcttcctcaactgtaaaccagtggtaaccagatcctaagtaatagttggtaattctcaactctttctaatcctggccctctcctccctttgctcagtgactttagagaaataactgaccctttctgagtcttaattccttcaacagtgtaagtaaaatgttgggctggatgatactctacttgaaaattcttctctcgtcccgaatcttacatcttcctggttctgggttcctatgggtgaatcctcctcattccctacatcccatgttctctgcttctttcctctctcctgctggcagaggtgaatctggcagctgcggtgatagcagtgctgggcctggcagtcatggccttggggtgcctctgtatcatcatggtgctcagtaaaggtgcagagttcctgctccgagttggagccgtctgctttggcctctcaggtgagggttcagagcctggaggctgaggacattgcatgctgggaggatctccaggcactgttgcatgctgggagatggggtctctatgcactgttgcacgctcagagatggaatctctatgcactgttgcatgctgggagtagggtctccacacactgttgcatgctgggagtaggatctccacacactgttgcacgctgggaggtgggatctccaagccctgttgcatgcttggagttgaggggaagcccaagggctatagtaggttcaaagatgggagaaccccaacaaccgggctaaggattggagggtgtccaaacattgttttagatttggacctgggatttccaatcactgttgcatgctaggcattagagaaagcgcaaggactatagaggtctcaaaaattggagagttctaagccctgttgttggctgggaattggaagctgtccaaacgcttttcaaggtttgaacatggagtccccaaacactgtttcatgctgagatgttttaagcactatagcgtgttgagaggtcagggaagcccaggggctatagcaggctcaaaggtggaagagttccaagccctattgttggctcagaatttgatggtctctaaatgctcttttagatttgagacttgaggtctgcaaggactgttgcattcttggagctgaaggtctaaataaaatgctgcatcttgtgaaatgtagccctcagtaataaacaacacttcagtttattgtacttccagttcaaatccttacaacagcactattaggcagggcttactatcccccattttatttacttatttatttttgagacagagtctccctttgtctcccaggctggagtgtaatggcatgatctcggctcactgcaacctccgcctgctgggttcaagtgattcttctgcctcagtttcccaagtagctgggattacaagcaggcaccaccacgcctggctaatttttgtatttttcggtagagacagggtttcaccacataagccaggctggtctcgaactcctgacgtcaagtgatctgcctgtcttggcctcccaaagtgctgggattataggcatgagccaccacacacagcttcccccattttataaatgaggaaattgaggctcagagaagtcagatgaattactcatgggcacacaatcaatgatggcatgatggcagaggtgggattttaaactcggttttctttctttcttttttgagatggagtctcactctgtcgcccaggctggagtgcagtggcacgatttcagctcactacaacctctgcctctaggttccagcccaagctgtgccctgaatcactgtgtggccttgggaaggttccttttattttctgggccttggttttcttcttggatcaaatgttttcttttcttttctttctttttttttttttgagacagagtttcgctcttgttgcccacgctggagtgcagtggcacaatctcagctcactgcaacctccgcctctcaggttcaagcaattctcctgactcagcctcccaagtagctaggattacaggtgtgtgccaccacgcctggctaatttttgtatttttagtagagacagggtttcatcatgttgaccaggctggtctccaactcctgacctcaagtgatccacccaccttggcctcccaaagtgctgggattacaggcgtgagccaccgcgcccggccaagactttcataaaacacttttatatcaacaccttcctgtgcacccccaggggtaatgcaggtgtgagtttaataataacgccagcaccaaattcctaccaagctacaaattccatgaaaacagacatcatctttatctttttcatcgttctgtcctcagggatttagagagggcctctctggggaggtgacattgaagatgtcaaagtatggatagacaagctgggagagtttgctgcattgcagatcttgaaagaaagccagtgtgacaggagtgtggagagagacagggagactggtgtaaaagatgtcactgcattaatgtgacattaatgtcactggtcctgtgacattaacagggaatcaaaaagatctgggttggagtcccaacttcttaacagccatgtaattggggcaaacctttttctatctctgagcttaaatctccttatagccatgaactcactcatccatgtatctgttagtattgtgtccatcctatccatccatccatttatccttccgttgattgatcagtttcctccttctctccccttccttcccctctctctctttccctatgtctctttctatctctctcttttttttttgtttttgagacagggtctcgctctctcatccaggctggagtacagtggtgcaatctcatctcactgcaacttcgacttccaaggctcaagtgattgtcctccctacctttcagcctcctgagtagctgggaatacaggtgcatgccgccaagcccggctaattttcggtttttttgttttttttgttttttttttttttgtagagatagggtttcgctgtgttgcccaggctggtctccaactcctgagctcaagtgatccgcccacctcggcctcccaaaagtgctgggattataggtatgagccaccaagcccggcccctctctcttttctttcttttccaccctctttcccttcctctctccctccaatcatctatttctccttttttttttttttacttgtccattcatttaacaagtatttctttaatatccagtgagtcccagatgctgtgctaggagccgctgaggacgcaacgatgaataaaataaagatgatgtttgttctcatggaatttgtagcttgctaggaatttagtgctggtgttattattgaactcacacctgcattactcctgggggtgcacaggaaactgttgatataaaagtgttttatgaaagtcttgagcacaaaaatgttccacagattgtacaaccaattgagagtgaagaaggatttgatgttgtaattactgtggttagattgcgtgtcagggactggggcaggttgggattttgaggtctccctaaataaagggtcgtgttcaggttgtcttgtttctctccttataatacatatatcagctgttgttctagttttagaggtatgagacagagaagtctgctgccctcgtggatttatagtgcagtgggagagacagaaatgagataaagagacattagtcatacaaatcaatatacattcataactaccaactgtgatgaatgctatagataaaaagtacagagtatgagaaaaatgtatgacaggagacccactgtagatttaggtggcagtggttagtgaaggcgtccctttgaaacatgtacttcatacagagatgtgaagaataaggacatctaagacaggctcagggagggggaggcggaaaattattccaagcagcataaaggtcttcaagcctgaacaaatctggtgcattgaaagtcctgctccacgctgcgagagtgtgggaggagcagcttgagaggaggctggagaagccgcaggagccagacccgcatgcctttttatttattttatttattttttatttttgagacagttttgctctgtcacccaggctggagtgcagcggtgcgatctcggctcactgcaacctctgcctcccgggttccagcgattctcctgccacagcctcggaagtagctgggattacaggtgcctgccaccacacctggctaagttttgtatttttaatagagactgggtttctccatgttggccaggctggtctcgaactcctgacctcaggtgatccacctgccttggcctccgaaagtgctgggattacaggcatgagccaccctgcctagccatccaccagcaaattctattggcactgcttccaaaatgtgttttgaatgcaaacacttccctcggtttcactaatccaagccacggctatatttccccgaggtaatttctatggcctcctaactcttctctatgcttctccttttaacctcctcaagtccattctccacagagcagctagagtgatacttctatttttttaattttaaattttttaagacagggtctggctctgtcgcccaggctgatgtacagtggcacaatcacagctcactgcagcctcaacctcctgggctcaagcaatcctcccacctcatcctcgagtagctgggaccacaggcacacgtcaccactctgggctaatttttaaaattatttgcagagatgaggtctcactatgttgcccaggctaatcttgaattcctggactcaagcagtcctctcgcttcagcctcccaaactattgggatgacaggcatgagccaccgcacccggccaagtgatacttttttttttttgagacggagtttcgctcttgttgcccaggctggagtgcaatggcacgatctcgactcactgaaacgtctgactcctggattcaagcgagtctcctgcctcagcctcccgagctgggattacaggcatgcgccaccacgcctggttaattttgtatttttgtgtgtgtgtgtgtgtgtgtgtgtgtgtgtgtgtgtgtgtgtgtgtgtgtgtgtgtttagtagagatgggctttctccatgttggccaggctggcctcgaactcctgatgacctcaggtgatctgcccgcctcagcctcccaaagtgttgggattacaggtgtgagccaccacgcctggcccctaagtgatacttttatatcataagtcggatcacggattctccccagaataaaagccacttaaattcctactgctagaataacatggtggcaaggcctcgcgcgggctgactcccggcgccctgcgactccctctcctgccacctgctctccctgctccggccacgccagcctctgctgttccccagacgctctaagctcattcctcccgcagcgtgttttcccgggctgcctcctcggcctggagcgttcttccgccggcgcttcacgtgtctcgtttcctcgcattgtttaagtctctggtcaaatgtcaccacctcagagagaccagcactgaccatcgtgtctaaaggggactcatttggtatccaagaaaatgttaaaaataaataaataaataaataaataaaagaggggggcgcggtggctcacgcctgtaatcccaacactttgggaggccgaggcaggtggctcacaagatcaggagttggagaccagcctgactaccatggtgaaaccctgactctactaaaatacaaaaatcagccgggcgtggtggcgggcgcctgtaatcccagctaagcaggaggctgaggcgggagaatcgcttgaacccgggaggtggaggttgcagtgagctgggatcgcgccactgcactccagcctgggcgacagagcgagactccatctcaaaaataaataaataaataaataaataaataaataaataaataataataaaagaaagagcacgtgagagaaactgggcgcggtggctcacgcctgcaatcccagcactttgggagggcgaggtacgtgatcccttgagcccaggagttcgagaccagcctgggcaacatagtgaaaccccatctctaccaaaaatacaaaaactagctagtctcataacctgatctcaaaaaaaaatagataaaaatttaaaaataaaataaactggccgggcatggtggttcatgcctgtaatcccagcactttgggaggctgaggcgggcagatctcaggattaggagttcgagaccagcctggccaacgtggtgaaaccccgtttttactaagatataaaaaattaggcgggcatggtggtgatgcctgtagtcccagctactaaggaggctgaggcaggggaatcacttgaattcaagaggtggagattgcagtgagccaagatcgcgccactgcactccagcctgggcaacagagtgagactccctcttaaaataaaataaaataaaataaaataaaataaaataaaataaaataaaataaaataaaccaggcgcggtggctcactcctgttatcccataactttgggagccgaggctggcagatcacttaaggccaggagtttgagaccaacctgaccaacatggtgaaaccctgtctctactaaaaatacaaaaattagctgggcgtggcggcgggtgcctgtaatcccagcaactcgggaggctgaggtgggaggatcatttgaacctgggaggtggaggtagaagtgagctgagatcgcaccactgcactccatcctgggtgacagagcaagactctgtttcaaaaataaataaataaataaataaataaataaaataagaaagaaagaagactcatttctagctgggactttacctgctttatttttcttcacagaatttatcactacctgaaattctctgcttatttatgcccgtattcatttgccagggccactataagaaagtaccacagcctgggtggctctctatttatttatgcccgtattcatttgccagggccaccataagaaagtaccacagcctgggtggctgtggtacaacagagattgatttcctcaccgttctggaggctggaggtctaagaccaacgcgtccacagggaagttttctccaaggcttctcttcttgtcttgtaaatggccaacttatccctgtatcttcacatggtcttccctctgtactggtctgtgtccccagttccttctttcttttcttttttttttttttttttttttgttgagtcagagtctggctctgtcacccagattggagtgcagtggtgtgatctctctctgctcactgcaacctccccctcccgggttcaagtgattctcctgcctcagcctcccgagtagctgggattacaggcacccgccatgacacccagctaatttttgtattttttagtagagagggggtttctctatgttggccaggctggtctcgaactcctggcctcaggtgatctgcccacctctgcctcccagagtattgggactacagccgtgagccactgtgcccggccttcttttttttattttgttattttattttattttattttattttgtagagacagggtctcactctgttgcccaggctgatcttgaattcctggcctcaagagatcctcctgcctgaaattttttttatctcataaggacaccagtcacattggattagggttccttctgatgacttcgctttaacttaattatctgtttgtgtgtgtgtgtgtttgttttgttttgttttttgagacagggtctcactctgttgcccaggctgaagtgcagtggttcgatctcagctcactgcagcctctgcctgcaggattcaagcgattctcatgcctcagcctcccgagtagctgggattacacgcatgcaccaccacgcctggctaacttttgtatttttagtagggatggggtttcaccgtgttggtcaggctggtctcaaactcctgcgatccgctcgccttggcctcccaaagtgctggaatgacaggcgtgagccactgcacccagccttaacttaattctgtctttaagaactctatatccaaatacagtcatgttctgaggtacttggggtcaggaccccaaaacatcaacttttttgtggaggacacaactcagccctcaacagtgcatttaactgataattgtccatctctccttcttggatgaaactccagaaggacagggatttagttgtagtatcatttatgtatcatattatatgtattttgtaataagagctcaatgaacatctgttgaatgaatcaaagaatgcatgaatcaggtctgctgtggtggctcacacctggaatcccaacattttgggaggctgaggcaggaggattgtttgaggccaggagtttgagaccagcccggggcaatgtagaaagatcccgtctctacaaaataaaatgaaataattagccatggcagcttgcgatgtagtcccagctactcaggaggctgaggcaggaggagggcttgagcctgggaggtcaaggttgcatgcagtgagctatgatcgcgccactgcactccagcctgggtggctgagaccttgtcactaaaaaagagaaaagaaaaaaaaaaaagattgaattaggaaaggaatgaaggggagtccttgtctaaatgcttttccacctcccgttctgtaatgttgggctgcatggagcaaagaaggggcttttaaatcacagcatcctggctgcattctccaggccctgaatcaaaaccacagtgaatggctgggcacggtggctcaggcctgtaatcccagcactttgggaagtggatagatcacctgaggtcaggagtttgagaccagcctggccaacacggtgaaaccccatctctactaaaaatacaaaaatgagccaggcgtggtggcaagagcctgtagtcccagctactcaagaggctgaggcaggagagtctcttgaacccgagaggcagaggctgcagtgagctgagattgcaccattgcactccagcctggatgacagagtgagattccgactcaaaacaaaaccaaaaccggtaaacaaacaaacagaaaaaaacaccacagtggggctggggcgcagggaggaagcagggtcaggaactggggttggggcaggactccagggtctggagagaaggcggctgggatccatgactcatgcgtgactctcagacggtcctgcatgacctggcccctgcccgcccctgcagttccattaccgcctctctccccaaccccaactctccttgctcccaccacactcagcttttctcttttctccaaacactctgtgctgcgtcctacacaggaccctcgcgtcagcacctccttctgctcggaacagccgttgcttcgttttgagcatgactgacttcttttcatccttcaggtcccagctcaaatggcttttctcgacaccatccaaagtccctgctccacccctgggtgccactctctctgtttctatttccttcctttcatgcatcaccctctgagattatcttgtctcctcatttgtttattttggacattgcaacctggcagcctgcaggccctcgatggccaggagatgtgctttgtttgccaggcagtgtgtaaagatttcttcgagttgacgtttaaaggttgggagaattcccataaaaataataatcatttaagcaattataggccgggtgcggcagttcacccctgtaatcccagcactatgggaggccaaggtgagtggatcgcttgaggtcaggagttctagaccagcctggccaacatggtgaaaccatgactctactaaaaatacaaaaattgccgggcgcggtggctcacgtctgtaatcccagcactttgggaggccgaggcaggtggatcacaaggtcagaagttcgagaccagcctggccaacgtggtgaaaccccgtctctactaaaaacacaaaaattagccaggcgtggtggcgtgtgtctgtaatcccagctactcaggaggctgaggcaggagaatcacttgaactggggaggtggaggttgcagtgagctgagatcatgtcactgcgttgcagtgagctgagatcatgtcactgcactctagcctgggcaacagagtgagactccatctaaaaaaaaaaaaaaaaaaattagccaggcgtggtggagcacacctgtagtcgcaggtactcaggaggctgagcatgagaatcgcttgaacctgggaggcggaagctgcaatgagctgagatcatgctgttgagcagctgcagctggcttctgccatcatttctaccttacttgccgccctgtgtgtttacactttctcatgccccctgcaggcatttgagttttgcaaattttggtttatttgtttactgtctatctccaagtaatatataagctccacgagggtagggtctttctctatcatgttctttctttttcttcttttttgctttttttaaaaaaaaaaaatcagcctgtaatcccagctactcgggaggctgaggcgggagaatcacttgaaaccagaaggcagaggttgcagtgagccgagattgccactgcactccagcctgggtgtaagagcgaaactccgtctcaaaaaaaaaataaaaaataaaaaattgcattgcaatatgactttatctttattttgtgacccctccccctctatcactcttttaaaaaacttgcatggagactatttcttttctttcttttttttttttttttgttgcccaggctggagtgcaatggcgtgatcttggctcaccacaacctccgcctcccaggttcaagcaattctcctgcctcagcctcccgagtagctgggattacaggtgcacaccaccacgcccagctaattttgtagtagagatagggtttcttcatgttggtcaggctggtcttgaactcctgacctcaggtgatccacccgcctcggcctcccaaagtgctgggattacaggcgtgagtcactgtgcccggcccaatttttgtatttttagtagagatgggatttcaccttgttggccaggccagtctcaaactcctggcctctagtgatccaatcgcttcagtctcccaaagtgctgggattgtaggtgtgcctggccgctaatggagtcttaatttgaattttgtgttttctgattcctgtgtttgctttaagaaaaaaaagttgtgggaaaatgtgctaaacataaaatgtgtaattttaaccatttcccctttttattttcaatttttatttatttatatatttttaagaattgggatcttgctgtgttgtccaggctggagtgtactggtgtgatcacggttcactgctgcctcatccttctgggctcaaatgatcctcccacctcagcctcctgagtagctgggactacaagcgtgcaccaccacacctggctaattttttaaaattttttttttgtagagatggagtcttgctatgttgcccaggctggtctcaaaatcctggcctcaggcaatccttcgtcctcggcgtcccaaagcgcttggattacaggtgtgagccacagcacccagcctcctcttttatttttagttgacatgtagtacttgtacatatctgtgggaaacagaaggatggtttgatgcatgtaaacaatgcataatgatcagatcagggcaattagcctatccacctcttcaaacttgatcatttcttcatgttgtgaccatttcaaaatcctctcctctagctctttgaaaatacacagccaggcacggtggctctcacctgtcatctcagcactttgggaggccgaggtgggtggaccacttgaggtcaggagttccagactagtctggccaacatggtgaaaccccgtctctactaaaaaaaaaaaaaaaatatatatatatatatatatatacacacacacacacacacaaaaattagccaggcgtggtagcgcacgtgtgtaatcccagccactcaggaggctgaggcaggagagtcgcttgaaccccagctactcgggagactgaggcagaagaatcaggaggcggagtttgcaataagctgagatcgcaccactgcactccagcctgggtgacagagcaagactccgtctcaaaaaaaaaaaaaaaaaaaaaaacaaaacaaaacaaaaacaaaaaactaaggaaccatattcaccctacagtgctgcgaacaccagaacgcgtttctcccgtctagctgtgattctatatccgccttttaatcattttccagcgtacggttctgtggcatcaattccgttcacattgttatgcaactatcacccccatccaccttcagaacgatttgcgtcttccccagctgaaattctatacctgttaaacaccaactcccctttttcctcttccctccggccctcggcaaccatccttctactttctgtctctatgactttgtgtcttgtttttttttttctttatctccagcttcccaaatgctgcctgctatatagtaggtgtttagtaagtatttgttgagtgcacgcgtgggaaggtgccagggtgggcgggagggctgggagcggatggcggagatgttcagacacagctggggtcgcgggcgtctgactgcgagctgtcctctctcccgcaggcctgctgctcttggtgagcctggaggtgttccggcattccgtgagggccctgctgcagagagtcagcccggagcctcccccggccccacgcctcacctacgagtactcctggtccctgggctgcggcgtgggggccggcctgatcctgctgttgggggccggctgctttctgctgctcacactgccttcctggccctgggggtccctctgtcccaagcgggggcaccgggccacctagagccacgcgtgagacttctctaagcaaccaccgagccctttgaccttctccattgtacccccaagatctttttgccccatctcctagagaaactgtgttctccctgctcgggggcccatgtttttttacacgcctgcctcctgtccccttatcctttctccctctgtaaatacgtttttctctgtggctgtatgtgggttgcttgggggtgggatgggaagaggctctttgcaaacgagggtccccagagaagactggcggggacctgatggggtagctggggtgtggggttgggggatgaggtcagggggtcttgggtgggagttgggggccccttcatttcccaggtctggatcgattcacttgccgggagagactttttacaactcatctgcagctccgggtgcggttgggggagatagcgaagggtctggcctcgctgtgatctgatttgggattaaaggtttggaaatttaacaactttgctttggagtctatttgtgatgtgatcgtgcattctggggtaaagaaaagtgaccccatattccctccagaaacataccctccagaaacacttttaagcccagaagtcacatgaaaacgaacccatacacaatggttgagagtgtggaaaacacaatatattttttatttttatttttattttgagacggagtcttgctctgtctcccaggctggagtgtagtgctgcaatcttggctcaccgcaacctccgcctcctgggctcaagtgattctcctgcctcagcctcgcaagtagctgcgtttacaggcacgagccaccatgcccagctaatttttgtattttttttttttttttagaagagacggggttttaccatgttaaccaggctggtctcgaactcctgatctcaagtgatccacctgtctcagcctcccaaagtgctgggattacaggcgtgagccaccgtaccccacccagatttcccctttacacatgactcctgtcatacgtgattaggatttacccccaatgaccttattttaacttgattatctctgtaaagaccgtatctccaaatgaggtcacattcttaggtactgggggttagggtccaacatatatatatatatatacattttgtaggggagaacattcaaccattaacagtgtatatattctaaattgtgttttctggtcgggtgtggcggctcacgcctgtaatcccagcactttgggatgccaaggcgggtggatcacctgaggtcaggagttcaagaccagcctggccaacacggtgaacccccgtctctactaaaaatacaaaaattagctgggtgtggtggcaggcacctgtaatcccagctactcgggaggctgagtcaggagaattgcttgaacctgggagttggaggttgcagtgagccgggatctcgccactgcactccagcctgggtgacagagcaagactccgtctcaaaaaaaaaaaaaaaaaaaaaaaaaatcaaaaaggtggggggaagggggattggttcaggaaagccttccgaagaagatgacgaacttgagtcttcaaggtgagtaagaatcagagaaagtggagaacgtcacgggcgttccagctgggtgggagagcctggacagaaacaagaggaaaaacatgatgaacctgtgagtgaggaaatgtgaacgctggtgttcagagtgagacacaggaaacgtgagagggttggggtgggctgtcttatgaacaaggtggagagactcagatgctcaacagaacagcttggcctttaccctgagggtactgaggagccatgggagcttgctgagcagagacacactggcatcaggtcaaggggttgaaacaaggtttcttattcttgaagtcactaaattgcagacccggaagacagactagtggttgccaggtgttaagaaaagggtgagtcttggccccacgcgacggctcatgcctgtaactccagcaccttgggaggtcgaggcgggtggatcacctgaggtcaggagttcgagatctgcctggccaacatggtgaaaccctgtctctactaaaaacaaacaaacaaacaaaacaaatcaacaacaacaaaacatacaaaaattagctgggtgtggtggctcacatctgtaatcccagcaccttcggaaatgcctgttctaatttaggtccatgggcacaggccctagggtagagcccttgccagagaccctgcccttctctacccagcagttctctgcccccctcccatatcaaaatgctttttctgcatctattgagatgatcatgtgattttatttttatttttattttgcagtctcactctgtcgcccaggctggagggcagtggtgcgatctcggctcacggcaacctccgcctcccgggttcaagcaattcttgtgcctcagccaccccagtacctgggattacaggtgtgcgccaccagacccagctaatttttgtatttttagcacagatggggtgtcaccacgttggcctggctggtcttgaacgcctgacctcaagtgatcgtcccacctccgcctcccaaagtgctggggttacaggcgtgagccaccgcgcccagctgaccatgcgatttttgtttctaattctgcattcttccattcaacaagcagaagtgccccgcagtgcctgggcacctgggagccaggctggtgtgaaagcccagctccccgacctatggctggggcaacagcttcacctctctctgtcttcgttccttcatccctaaagacggtgcgtgagctcaatcctgtacctactcccaggagtcaccgtcgggagtaaacgccatcatgagccctgcaaagctcccaggagaccgcctggcacgtggtcgcaactcgatctgcctttgctgttagtttttctcaagtggcacttacagagtaaacagggacccccgacgacgagctgacagcctgctgatggaaacagatactaatcacatcactgaagtaatgagcgtgcaattataaaccaagttaagtgctaggagacaagagagtccacaattttttttttgttgtttgactttgtgcccagccaggtcagggaagcctcaagagacatctgccatgggggtggcggagatagttggtcttgggggaatggcccttccttccttccttccttccttccttccttccttccttccttccttccttccttccttccttcttttctttcttcctctttctttctttcttctctctctctctctctttctttctttccttctttctttttctttttttttttttgagccgaagtctcgctctgtcacccaggctggagctcggtggtgcaatctcggctcactgcaagctccacctcccaggttcacgccattctcctgcctcagcctcccgagtagctgggactacaggcgcccgccaccaagcctggctaatttttttgtatttttttttagtacagacggggtttcaccttgttagccaggatggtctcgatctcctgacctcatgatccacccgcctcagtctcccaaactgctggaattacaggcgcgagccactgcgtctggcctctctctcttcctccctccctcccttcctttcttcctttttctttctttctttcttttttcttctttctttctttctttgtttctttctctttctctttctctctttctctctctctttctttctttctctctttctttctttcttttcaagatggagtctcactctgtcccccaggctggagtgcaatggcacaatcatggctcactgcagcctcgactttccaggttcaagcgattctcgtgcttcagtcccccaaatccctgggactacaggcacacacagccacagccagctaagtttttgtattttttgtagagatggggatctcccactgttgcctacattggtcttgcacttctggtctcaagtgacccactcgccctggcctcccaaaatgctgggattacaggcatgagctaccgtgcctggccactcttcattaaaaaaaagataaataaatagagatggggtctcactgtgttgcccaggctggtctcaaacaccaaggctcgtatgattctcctgcctcggcctcccaggtacatgaaccaccgcacctggtgggaatggctctttgtccagtggggtcatcattctgaaaactctttcttacccggggtcagggcagggaaggttcaaagccagagactcaagagaaaagggagatggcaattttcccccaaaccctccctgaccacactccgagtggttcccccacggccagttcaggcttcagctctgggtggggagagactggagggaggggaaggcagagatataacatagattgatcagaagtgggagaaggaattacagacctcacaaagacaaatgactggaatcacatcatcctatgaaacaatgtattgttggggctcagaaaacaatacccccgaagtaaggatgacgtttgtcaggtggagcatttgaactaaaggagattagaaggtctcagaggcggccgggccatcatctctacaaaaaatacaaaataactagctgggtatggtggtaagtgtctgtagtcccagttactgaggaggctgaggcaggagaatcacttgaacccaggagatggagtttcagtgagccgagatcatgccactgcactccagcctgggtgacagagtgagaccctgtctcaaaataaaataaaataaataaaataaaataaaataaattagctgctgctgctgctgatgcacagtgctatgtatgagtgttccaacagtagctattttaattaaattaatttttttgagacagggtctctctctttcacccaggctggagtgccgtggcgtgatcacagctcactgcagccttgacctcccaggctcaagtgatcctcccacctcagcctgctgaatagccggaactgcaggtgcatgccaccacaccaggccaatttaaattttttttttaaagagatgagatttcaccatgttgcccaagctggtcttgaactcctgagctcaagcgatctgcccacctcaacctcccgaagtgctgcaattacagacatgagccatcgcgtccagcctattttaattttataacctctcatgaaatctctccttcctcaatttctcttctgagggttctgactttagccggaattggaaagaggcccaatgcttcatgaaggatgacagctggagaagtactagaaggttgcctggcaacagtggtgttagggcagaaaggagcaagtccctgggtggtttcctagcagaaggaatgtgggcagggctgagcctaggaagcaagataggagatgacaagggtgcccagatcatcaacttctgaagaatttctcatccctgcaccccagagcctctggacacagcccatctctcatctctctctctctctctctctctgtctctctctttttctcccctcccttctcatcttttcctcgtcttttttccctttccctctcatccctccctcctcctccttttacttctttcttccttttcttcttcctcttcctccttctcctattactattactactgataataacaatagctaacatttgttaaatgcctcatctgagagattttctttcggggtgattaaaagtttctgatgctaggccaggtgctggggctcacacctttaatcccagcactttgggaggccaagttaggcagatcgcttgagctcaggagttcaagaacagcctgggcaacatggtgaaagccagttccctataaaaaaaaaatacaaaaattagccaggcatggcggtgcatgcctgcggtcccagctactcgggaggctgaggtgggaagatcacttgagcccagaaggtcaaggctgcagtgagctgtgattgcacccttgcaatccagcctggaagacagagtgagaccctgtcttgaaaaaaaagaaaaaaaaaaaaggccaggcgcggtggttcacgcctgtaatcccagcactttgggaggctgaggtgggcagatcatgaggtcaggagatcgagaccatcctggctaacatggtgaaaccccgtctctacttaaaaaaagtacaaaaaattagctgggcgtggtgatgggcacctgtagtcccagctgctcgggaggctgaggcaggagaatggcacgaacccaggaggtggaggttgcagtgagccaagatcacaccacttcactccagtctgggcaacagtgcaagactccgtctcaaaaaaaaaaaaaattttttttcctgacactagatagtggcaatgcttgcacaacattttggaggtacttatgtacttagtatcagtaagtatagtacattttttaaatagttagaatggtaaaatcttgctttaagtaacggtaagattttaccacaaaaataaagtccaggcatgggtaaagaatagtttacgaccactatgaaataaagagaagtgagcatgaggaggttctgaaatgggtatcactccctgataagaagctagaaggaggccaggcgcggtggctcacgcctgtagccccagcactttgggaggctgaggtgggcagatcacgaggtcaggagttcaagaccagcctggccaatatggtgaaaccccatctctgctaaaaatacaaaaattagctgggcatggtggtaggtgcctgtaatttcagctactcggaaggctgaggcaggagaatcgcttgaaccttggaggcggaggttgcctccaagatcacgccactgcactccagcctgggcaacagagcgagactccgtctccaaaaaaaaaaaaaaacaaggaagatagaaggggagaagggagttgttgagctgttgcctcacccttgagcatggtctggacaggacacaatgtgtggagctgccccgggtcatgggtgaccaggaggcaacaggccaaacattgaagacatgagtggtaaaacagaaagggcttggttcttagcaacatgcatgagtttttgcacaaaatcttcctgttaggcaaggtaactaaatatcttttttgtttaggtaatcagttcttcaaaactgagcccatgttgataagttactccaccaaagggtggagtacagtaaagaaatgaggcttgtggttacagatgaagcaatgtctttgagaaaagcccttctttgccacaatcactttttttttttcttttgagacagggtctctctctgtcgcccaggttggagtgcagtggcgtgatcttggctcactgcaacccctttccccctggttcaagcgattctcctgcctcagcctcctgagtagctgtgattacaggcacccaccaccacgcccagctaatttttgtatttttagtaaagacggggttttgccatgttggccaggctggtcttgaactcctgacctcaggtgacccgcccgcctcggcctcccaaagtgctggattaggcctataaaagccattttaactgcggtgagaggatatatgtgtcatgtagtttagccaggcatcgtggtgcacacctgtagtcccagctactcaggaggctgaggtggggggatgacttgagcctggaggctgcagtgagccatgatcgtgtccctgcattccagcctgggcaacagaccctgcctcaaaaaaaatacataaaataaaaattaaactgaaatagggttgccagattcaatgtaggatgcccagttgatttcaaaactcagataaacaacaaataaaatgtttaagtctaagtacagcccccaaactgcatgagatatacttacattcaaaatttttttgtttatctaaaactttaaatttaactgggcatcctgtattttaatgtcccaagtctagcaattctattttaaaagaatccctctgtctgctacgttgagagcagatggtcaaggcgggaaatgaaggtagaagcagggagatggtttaggacgctattgtgatcaggtgagaagggctgagtcagaccagagggtgccagcaaggctgaagacccaccctgttcccagccccgcccctcctgctgcccttaactgatgtgacacaatccttgtgaggtctgtggacagagcgggggaactgcacggaatctgacaatatcaacctaaaaattattcactgcctactcatttcccgtgcaaggacaaacaagagtgctgaaatgcgaggcttgcaaagccacaagatagggagggcttaatcatttgcttgcctgccttatcagtgttacgaaggcattttccaccttccacttccttttccgtttggacaaaaattcaaacttctaggccaggcgcggtggctcacccctattatcccagcactttgggaggccgaggcgggtggatcacttggggtcagcagttcgagaccagcctggccaacatggtgaaaccccgtctctattaaaaatacaaaaattagctgggcctggtggtgcatggctgtaatcacagctatctggaggctgaggctggagaatcgcttgaacccaggaggcgggggttgcagtgagctgagattatgctaccgcactctagcctgggcaatagagtgagactcagtctcaaacaaaacaaaacaaaacaaacaaaaaaaaccacacgcacacacacacactcaaacttcttttattttttgagacagattttcgctcttgttgcccagcctggaatgcaatggcacgagcttggctcactgcaccccccctctcaggttcaagcgattctgctgcctcagcctcccaagtaactgggattacaggcatgcgccaccacgcccggctaactttgtatttttagtagagatgaggtttctctatgttggtcaggctggtctcctgcctcggcctcccaaagtgctgggatgacaggcatgagccactgggcccagctacattcaaacttctttttttttttttgagacggagtctcgctctgtcgcccaagctggagtgcagtggtgcgatctcagctcactgcaagctccgcctcccgggttcacgccattctcctgcctcagcctcccaagtagctgggactacaggcgtccaccaccacacctggctaattttttgtatttttggtagagacggggtttcaccgtgttagccaggatggtcttgatttcctgacctcgtgatctgccccgccttggcctcccaaagtgctggggtaacaggcgtgagccactgcacccggccccacattcaaacttcttatcacaacttgcaaagttctgcatgatccgggcttagcacctcccttctcctgctgtgctctagccggctcactttgcctcagccacgctggcctgtgtccattcttggaactagtactggccaggcttgctcctgccccagggcctttgcctgcgctgtgccttctgcctgaagtgtcattctctttgcatttctcatggctggatacttacactgtttttaattctcagcttcaacatattttcatccaagtcttcccttacccactttgcaaaggaaagacccacctcccatacactcattgtgttatagtgcatccctcttgatttctagcatgtctcttgttacaatctacagtttgttgtttttttctttcagatggagtcttgctctgtcgcccaggctggagtgcagtggtgtgacctcaactcactgcaacctctgcctcccgggttcaagtgattctcgtgcctcagcctcccaagtagctgggactacacgcgtccaccaccacgcccagctaatttttgtatttttagtggagatggggtttcaccatgttggtcaggctggtctggaagtcctgacctcatgatccgccagcctcggtctcccaaagtgctgggattgcaggcatgagccgccgcacccagccaacagtaacagtcttttcaaaatgcctggtccatagtacgtgctcgacaaatatttgtgaaatcactggatacataagacagttccagggaaggggagtagcttgctcagaacagggaagctgcccaggagtctttcccctgattctcagaccacgatcccgtgctcagctcctcgcggattcaaggctgatgaaggcaagggccacactgtcacccactctttgaaagccccaaaccagaagtcattccggggtggctgttcaaggttcttcactgatcaggtctcttggtaacaagtgttggcctcccacaggtacatgtcagcatctccttcctttcagaggctgaatgcttgtccatttatgtagatcccacactttctttacacattcattcattgatggcacttacattgcttccatttcttggtttttgtgaataatgctgttaagaacatcaacgtataaattatctcttccggccgagcgtggtggctcacgcctgtaatcccagtacttcgggaggccaaggagggtggatcacttgggcccaggagttcaagactagcctaggcaacatggtgaaaccctgtctctacaaaagtaaaataaaataaaattaaaattaaaagtagctgggcttggtggtgcatgcctgtagtcccaactattcaggaggctgaagtgagaaggtcgctcgagcccaggaggtcgaggctgcaataagtaagccaagatcacactactgtattactcaccaggcaacagagagagagaccctgtctcaaaaataaatacacagataggctgggggcagtgactcatgcctgtaatccttggcttgggaagccgaggagggtggatcacctgaggtcaggagttcaagaccacccgggtcaacatggcaaaaccccatctctactaaaaatacaaaaattagctgggcatggtgttaggtgcctgtagtcccagctactcgggagactgaggcagcagaatcacttaaacccaggaggcagaggttgcagtgagctgagatcgcaccactgcattccagcctggctgacagagtgagactccgtctcaaaaaatacatacatacatacatacatatctcttcaagatcctgcttggaattcttttgggtatctccccagaaatggaattgctggatcccatggtaattctattttatgagttagaacttgatggcctgaatttttgtggtgtcagctgcagactcacagtgagggaagcccaggaggggatgggctttaagaggatgatgctgcaacagaggggctttagttaacacggatgtgctgtgttcttgagccttcctaagagagtagattgtaagtgttcttaccacacacacaaaaatgataaatgtgaggcaatgcacatgtaaattagctcaatttagccttttcacaacgtatactatttcagcacatcatgttgtacaccataagtacatacaatttttatttgccctaaaaaataaatcagtaatgcttaaaaaaattaaatttcatattgtagggggggaaacagtgcatgatgttgcaatgtactgcgtttcatttcctgaagcgtcagcgaaagaccagccctggggtagaagaccggagcggagggagcgtggcctccccagctccccacttccttctcaagctgcaggctgaactagggtctctggaactgggctaaggcgcccccgtgtctgcagcctctctgcggggcttcatggactccagcaaaaggcttgaggctggaaacgagggtatgagcgtgcggagaggtagggtgaggttgggtttctgcaaggaaataataatcaccgtgcttaactgatgtactaggcaccaggctgaaggccccatcagctggcgaggctgggagagaaattgacatcccctcttgctgccccgccgttggctggaaacagtcatgagccgccacctagcggcgaaaatgacagcaacaacttggacctagagctggggccacggaacgaaaggcgtcatccctttaaattaggacaattgccctctctcagggcagcttctctgttctggttacctgctgacttacacccagtcaccccaaacttcgtggcaaaaaacaactgctatttatccatccatccttccttccttccttccttccttctttccttccttccttccttccttccttccttttatgaggcagagtctcgctctgtcgtccaggctggagtgcagtggtgcgatcttggctcactgcagcctccatctcccgggttcaagcgggattcccctgcctcagcctccctgctagctgggattacaggtacgagccaccacgcccagctaatttttgtatttttagtagagacggggtttcaccacgttggccaggctggtcttgaattcctgaccttaggtgacccgcctgcctcagcctcccaaagtgctgggattacaggtgtgagccaccacgcccggctatagtttatttatactcgtagattctagcagtcaagaatttggacagagtacagcaagggtggttttatctgcagcctcagctgcaaagactggaatggagggtgccggaattatctggaagatctgggagcgtcttcactcatacgtccggtgtctgggctggatgactccacggttgtgcgcagctggaggacagctgacccgagtgcccacacgtggcctctctgtgtgacttgggcttcctcacagcatggtggtctcaggacaggcagacttcctgcatgacgtttggttcagcaaacaaggcagaaggtgaatcaccttttatgatctagactcagaagttgcctctaggctggagtgcagtggtgtaattatagctcactgcagccttgacctcctggactcaagagatcctcctgcctcagcctcccaaatagttggaactacaggcatatgccaccatgcctggataatttttagtttatttgttaaatgtagagacggtgtctattctgactctatcagccgaagcagtcagggactcaccaatatttcagagcaaggagctatagactgcacctgtagaagggagaatgtcagctgggcgcggtggctcatgcctgtaatcccagcactttgggaggccgaggcaggtggattacctgaggtcaggagtttgagaccagcctggctaacatggtgaaaccccgtttctactaaaaatacacacacacacacacacacacacacacacacacacacacacacacacaaaattagccaggcatggtggcgggtgcctgtaatcccagctactctggaggctgaggcaggagaattgcctgaacctgggaggtggaggttgcagtgagctgagatcgtgccattgcactctagcttggacaacaagagcgaaactccatctcaaaaaaaaaaaaaaaaaaagaagagagaatgtctaacaacttgcagctgtgttttaaaactggatgttctccctgaggacttgaatataaagctttgtcagttgcttggtgtggtgaagcaatgagagtgtttttttcgggggaggaggtgtcagatagatcaagaatttataattagcataagaaatgtacttcttaacaaagccagcctgggcaacatagtgagattcccatctctacaaaaaaaaaaaaaaaaaaattagcccagtgtggtggtgcacacctgtggccccagctacttgggaggctgaggcaggaggattgcttgagcctgggaggtcaaggctgcagtgagctatgattgtgccactgcactccagtctgtgtgacagtgcaagaccctgtctcaaaaaataaaaagaaaaaaaaagaaacatactaaaaaaggacacatattagcaatatgaaacaagaacaattttccataaagcaagaggcttatggaaataaaaagtataaaaatacatgatggtaaaaaatatataacattatcctctaacagaataggcagtagggtgggtgccgtggctcacgcctgtaatcccagcactttgagaggctgaggtgggatgatcacttgagaccaggagttcgagaccagtctgggcaacatggtgagaccgtgtctctttaaaaaaaaaaaaaaaaaaggcagaattgatacagctgaagaaaaatgaacaagtaagaaaatgtggtggaggaacttctccaggaagctgatataattatattaagatcagaaaaaataagagaaaagtcatcgtacgatataagggacaggtgtttctcaaaatccaaaatcttctctgctaagagaatcctgattttgtttttgtttttgtttcttgagatgcagtcttgctctgtcgcccaggctagagtgcagtggtgcaatctcagctcactgcaaactccacctcccagattcaagtgattctcctgcctcagcctccccagtagctggattacaggtgctcgccaccacacccagctaatttttgaatttttagtagagacggggtttcaccatgttggtcaggctggtctcaaactcctgacctcgtgattcgcccacctcagcctcccaaagtgctgggattacaggcctgagccaccgcacccagccgagaaccctgattttgttcaggtgtcagttggccacccttgttccttggagacttggcccttttctagtttcaggcatgaatcttgattagtctaaggcttagtgacgtgctggttgtgaaagtgtggtccctgaaccagcagcgtcagcatcacctgggagctcgtcagaaaggcaaattcttgagccccaccccagacctactgaatcagtcagaaactctgaaggtgagcttttcctttctcctcctctccaacctatggtttgacaagtcctccaggtgattctgatgcacactgaagtttaaacacctttagcccagttaggtaaactcacgcccactgctagtggttatttaaggaaggggctggatgcaattgtgtttcttgagatgtgagtggaaatctcgtgggaggcttcctcatgttggagagggccgcgttggaagggcctttctatgcccttcgtctgctttttatctcatcctttccaaaaaattaactttttatttatttatttgagacagagtcttgctcttgtcgcccaggctggagtgcagtggcgcgatctcggctcactgcaacctccacctcctgggttcaagcaattctcctgcctcagcctcccgagtagctggggctacaggcacctgctactatgcccagctaatttttgtattttccgtagagacagggcttcaccatgttggccaggctggtctcaaactcctgacctcaagtgatctgcccacctcagcctcccaaagtgctggcattacaggagcgagccacctcacctggcttaactttttattttaaaatagttctggaggccaggtgtggcagctcacgcctataatcccagcactttgggagtctgaggcagaaggatctcttgagcccaggtgttcaagaccagcctgggcaacatggcaaaatcccatctctacaaaaaagtttttaaaaattagcatttgcctgtgcgtccagcttctcaggaagctgaggcgggaggatcacttgagcttaggaggtcaaggctgcagtgagacaccatactgggattacaggcgtgagacaccactccaggtctgggttctctttttttttttttttttttttgagacagagtctcactctttcgcccaggctgcaatgaagtggcaccatcttggctcacagcaacctccaccccgcagattcaagcgattctcctgcctcagcctcctgagcagctgggattacaggcgcccgccaccaagcctggctaatttttatattttagagatgcccaggctggagtacagtggtgcgatctcagctcaacacaacctccacctcccggattcaagtgattctcctgcctcagcctccccattagctgagattacaggcatgcaccaccacgcccggctaattttgtatttttagtagagacagggtttctctgtgttggtcaggttggtctccaattcctgacctccggtgatctgcctgcctcggcctcccaaagtgctgggattacgggtgtgagccactgtgcccggctgatcttacattttcttgtgcacttattcatgagctttttttttttttatgaaaatgaattcctaccatccattctccttccaaactgctcatacccagtattcccaaggtttttgcacatgtatataacagaatgtcaaagtagattcattgcaatctcagtttctgctcaggcccaaagattatagatgccagcgaggtcagatctcacagtaaggccatttctgcatgacttcaggagaaaatgctgaaaacctaatttccccacacccttggcctcttgtccacctgaaggtaagaaaggagtgttggggggaagggggagggatagcattaggagatatacctaatgctaaatgacgagttagtgggtgcagcacaccagcatggcacatgtatacatatgtaactaacctgcacattgtgcacatgtaccctaaaacttaaagtataataataataaaataaaataaaaataaataaataaataaaaattaaaaaaagaaaaaaaaaagaaaggagtgttgagattagaaggtattttttttcctattgggatacaggtggtgtttggttgcatgagtaagttctttagtggtgctttgtgagattgtggtgtagccatcacccaagcagtatacactgcaccccatttatagtcttttatccctcgcccccctctcacctttccccccaagtccccaaagtccattgtatcattcttatgcctttgcatcctcatagtttagctcccacatatcagtgagaacatatgatgtttggttttccattcctgagttacttcacttagaataatagtctccagagattagaagagtttttgttttgttttgtttctgtgtgtttgtttacgtaagctgttggtgtgctgtgagtcccatcctctgtccaccgtagatgtgtgatggaggatgacagtctcttcaactggacaattcagagtagttatatggggtgaggggcgggtccagagaggaatggggtctgatatggtttggctttatgtccccacccaaatctcatcttgaattgtaatccccaggtgttgggggaggaacctggtgggaggtgattgaatcatggaggtggcttctaccttgttgttctcatgataaagtgagttctcaggagatctgatggttttataagcgtttggcaagttcctcctttgcttgctcttctctctctcttgttgccttgtgaagaagatatttgcttctccttccccttctgccatgactgtagtttcctgaggccaccctagccatgtggaattgtaagtcaattaaatctctttcttttttttttgagactgagcccccctgtcatccaggctggtgtgcagtggtgcaatctcagctcactgcaacctccgcctcctgggttcaagcgattctcctgcctcagcctaccgagtaactgggacaacaggcatgcgccaatagccggctaattttgtatttttagtagaggtggcgttcaccatgttgaccaggctagtctcgaactcctaacctcaagtgatccgcccacctcagcctcccaaagtgctaagattacaggtgtgagccaccacacacggcctcggctatttatagcagtgtgagaacgggctaacacagggtctttcctcactggagagagagggtgggaggagagagagagggtgggaggggagagaggggagaggggagaaatgggggagggggggagaggggggagagagaatgaatatgagaatgaatgtaccaggagcttttatcctttgcaggagcgccacctggaggtaggaggtgaagtctgcagagagaagctggaaatgtactgacggatccccaaggattcagtaatgtgaccaagtggaggagctgcatttacaggcatcaagggaactgcaggtgagaggtctgcagccttgcaagagagtgggggaagcaggagaagctccacgtggggagataaaggaaaagctgaccacgcttcctccacgttgcaggcaacctgccgaaaggattttaatcactgagctgacactgtatttttttcttgtatgtgacttttttaagaagcagctggaagtctttatgacctaagatgactataaaaattatgagaaggccgggcgcagtggctcacacctgtaatcctagcactttgggaggccaaggtgggcggatcacttaaggtcaggagttcgagaccagcctggccaacatggcgaaaccctgtctctactaaaaatacaaaaattagctgggcgtggtagcacatgcttgtaatcccagctgctcgggaggctgaggcaggagaatcacttgaacctgggaggcagaggttgcagtgaaccatgactgcaccatagcactccaggctgggcaacagagcaagactgtctcaaaaaaaaaaaaagttatgagacttgctttacatgtcacccaagggcacaggtaaagaattagacctaggagttgggttgatagggcaatgggaaaaaagaaaaaaattgtttactgaatcaagggaataatcacacctacatctttgcaactcacgtgcttacaactagggcaaccaaattgttccggttcgcccaggattttctctggtttagccctgaaatttctgtgtcctgggaaattcctcatttctattttaaaaccgaaagtcccacatcctaagacacacacacacgcccctgcacacaccaatcctggtaaaacggtaacagttggtcatactatctacaacaaccctattcgagatctgtgtcttcacgatgaggaaaggcacatgcagttctggagattttaacacgtgttcccaaggtcacacaacctgcccttgtatccagcactgaaagcagatgactctcctctttccacgattctaagcctcttcccgtagcatgtcccatgtggaggagaaaagttaagaaaatgaaactggccaaaacttgctactgcatttgtgattttagaaagtaaatgatcagacattattaaaattatcaatgcaaaaagaaagtgagactgaacagattgtttaccttaacaagatcaagttaaactcgtatagggcttatatataatgccgcttaaaagctcaagtttatgcggggcagttttggtggaagaagctcaggcagtccctctggtggtcgttatagatctggccgtggaactggtggatatgaaaacagaaggttctaaaaacagcagaaaagggcaacagttcttagcaggagagacagtgaggaaagctgcaggttacttggagacagtcatcccaaatgcattagaggaggtgtaaaaatctgccacagaaggaacaatgatccatagtcagaaaagttactgcagcttaagcaggaaacccttcttgttcaggactgtcatagccacagtttgcaaaaagtgcagctattgattaatgtgatgtagtgtcaattagaggtacatccctgaggtctttaaaacaaaacaaactcagccaggcacggtggctcacacctgtaatcccagtgctttgggaagctgaggcaggcagatcacctgaggctgggagattgagaccagcctggctaacatggtgaaaccccgtctctacgaaaaatacaaaaattagcccggcatggtggtgggcgcctgtaatcccagctactcaggaggctaaggcaggagaattgcttgaacccaggaggtggaggtttcagtgagccaagatcgtgccactgcactccagcctgggtgacaagagtgaaactccgtctcaaaaaataaattaaataaataaataattagctggacgtggtggcaggcacctgtaatcccagctacttgggaggctgaggcaggagaatcacttgagcctgggaggtggaggttgcagtgaccagagatcgtgccactgaacgccagcctgggcaacagagcaagattctgtctcaaaaacaaaaacaaaaacaaaaaaaggctcaagtttatgaatgaactgttcatatcaggtgatggtctttcaaaataatgactgttttgtaccaactattgtgctcatgtgattgattgaacaatgcttccaaagaatttgaaacaataaggcaaagaaacctaatgttcataacagaaaaaaaaattaaatgtatagcactagaaaaattgatttttttttttttgagacagggtctcactctgtcacccaggctggagtgcagtggtgcaatgatggctcactgcagcctccacctcctgggctccagcgatcctcctgcctcagcctctagagtagcccggactacaagcatgcaccaccatgctcagctaatttttgtatttttagtatagacagggttttaccattttccccaggctggtctcgaactcctatgctcaagcaatcaacttgcctcagcctcccaaagtgctgggattacaggcatgaaccacagagcctggcatgatactagaaaaattctttttttttttttgacatttaagttcaggggtacatgggcaggatgtgcaggtttgttacacgggtaaacgtgtgtcatgggggtttgttgtacagattattttttttctagtgtatttactacttcctgattatcagattattttatcacccagttattaagcctagtacccactagttatttttcctgatcctctctctgctaccaccctccaccctctgacaggccccagcatgtgtgaaaaattcttatagtcttctagaaaatacaataggtagcctttggaacatagggtatcataaagagaagctgtagaaaatatatttctttgaatttttttttttttttttttttacaaatgatcactataatgtttaaaatatgtttaccacctacagttgtgtgctagggaagccataacaaaatgccccccactggggggcttatgggacagaaatggattttctcaccgttctgcaggctggaaatccaagatggaggtgccagtagggtcagtttctcccggggtctctctgctttgtatgcagatggccgccttcttgctgtgtctccacgtggtctttcctctggatgtacatatcctggtgtccttttcttttttttttttttgagttggagtcttactctgttgcccagctggagtgcaatgacacgatctcagctcactgcagcctctgcctcctggattcaagcgattcccctgcctcagcctatcgagtagctgggattacaggcgtgcaccaccgcgcccagctaatttttgtatttttagtagacatggggtttggccatgttggccaggctggtcttgaactcctgacctcaggcgatccgcccacctgggcttcccaaagtgctgaaattacaggcgtgagccaccacacgtagcccctagtgtcttttttatgtccaaatttccttttttcacaacggcctcttgtctctaaatacagtcacattctgagttactgggagttaggattcagcacacgaattttgaggagatgtaattcagcccataattaagccctatcctcatcagactgatgatctgtgctttctctgaactaacaggatttatatattcctttttaacagcaaggaactcaggttctccatggcccctttatgaagttgctcctgctggtacatgaccctcagttagtttcctgaagttatttacaaagccacctccacatgtgttgagcctcttcagtttacttcaaatcctgggcctgtgctgcatggcggtgctttccacagattcatatgttagatcttttctatttttttttctgagacagagtttccctctgtcgcccaggctggagtgcaatggtgtgatctcggctcactgcaacctctgcctcctgggttcaagcaattctcctgcctcagcctcctgagtagcagggactacaggcgtgtgccactattcccagctaatttttgtatttttagtagaggcagggtttcaccatattggccaggatggtctcgatctcttgaccccatgatcctcccactttgacctcccaaagtgttgggattacaggtgtgagctaccgcgcctggccacatattaaatctttttttttttttttttttttgagacagagtcttgctctgtcacccaggctggagtgcaatgatggatctcggctcactgcaagctccgcctcccaggttcatgccattttcctgcctcagcctcccgagtagctgagactacaggcacccgccaccacacctggctaattttttgtatttatagtagagatatgttagccaggatggtctcgatctcctgacctcatgatccacccacctcggcctcccaaagtgctgggattacaggcgtgagccaccgcgcccggcctcatgttaaatcttgacacccaatgtgatctgagaggttgggcctttggtgatggcagcagccactccagacggcttgctgctgccatgacgccacctgccccagggaggcccagcccgggctatacacgctatggagccgcagggagccctgccccttccgagttggggcgggagctcccagggtgatgctacagctgtccaaaccccagctgtggatccgagcctccctcagatcgtatcacatatcaagacttactcttgttgacaaaaagagtcaaactctataaaatatttgaagagatttattctgagccaaatatgataatgaccatggcccctgacacagccctaaggaggtcctgagaccatgtacccaaggtggtcggggggcagcttggttttatacattttagggaggcgtgaggcatcaatcaaacacatttgagaaatacattggtttggtccagaaaggctggacaatttgaaggaggcagggccttccaggctttaggtaaattaaaacattttctggttgacaattggttgagtttgtctaaagacctgggattaatagagaggaaatattcaggttaagataaaagattgtggagaccaaggttcttttgaagtcttatagtggctgcccttagagacaatagatgacaaatgtttcctactcagaccttcaaaagttgctagattctcagttaacctcctcaggattgggaggtcctggaggaaaaagatctagcaatgttaacagagatcctttacatatgcaaatattcccccccaccaaggacagctttgcagggccatttaaaaatatggcaaagaaacatgttttggggtaaaatatttttattttcttctttgttaggtaatgttatgccagagtcagattggaaagtaagtcacgatatatagggctaaataaaacccatctgatgagaatttatggtttgtagggcatgagaccccagaccccttagataagaatctgggcaagataaaaaaaaaaaatcagagctgagtcctcactatggtaattcagtgagtgtgactaccagcatagatgtccataaaggatatccattagggccacccattttaataatgtttgccaggacccttcaatcaaaacaaaatccattctcagaatagcttagaatcaaaggaggactttttgggtttttttggttcaagaaggattgggcaagaaaactgcagggagtgaaggaatgctgagctttggaagcaattagaaccaagaaaacaaaagctgaaagcactgttactcactcccgcttcccggatgctccctgagtcatctttgtgtttctccataaagactggcttcctccacatggcgagacagatggccaccaagaactcccaagcttaaaaaagaatgactctctgtggcaagaaaacaaagagacactcctccccaccttgctactccctatgtggcctccacactgcaacctgggactgtgtagtgaggggagggggagcgaagaagtttgcgttagtctgttttcacactgctgataaagacatacctgagactgagtaatttatttttatttttatttttatttatttatttttttgagacgcactctgtcacccaggctggagtgcagtggcacgatctccgctcactgcaagctccgcctcccggggtcacaccattctcctgcctcagcctcctgagtagctgggactacaggcgcccgccaccgcgcccggctaattttttgtatttttagtagagacggggtttcactgtgttatccaggatggtctcgatctcctgacctcatgatccacccgcctcggcctcccagagtgctgggattacaggcgtgagccactgcgcccagtcagtttactttttaaaaaagaggtataacggacttacagttccacatggctggggaggcctcacaatcatggcagaaggtgaaaggcacatcttacatggtggcagacgacagagaaatgagagagccaagcaaaaggggaaacccgttataaaaacctcagctctcctgagacttgttcactaccatgagaacggcatgggggaatgtgtgggtggaggattagccaggtgctgaggcaagagactgaaggcacaaactgttgcagtataataaagaaaatagaataagaatagtcataatacaaattagatgtagagatgatcatggacaattatcaatcattattataaacattattaatcattagcttttaatattactctttgctgcattactaatataacctaggaataaccggcgggtatagggtcaggtgctgaagggacatggtgagaagtgacctagaaggcaagaggtgagccctctgtcacgcgtgcatcagggccgcttgaggggtccttggtcaagcggtaacgccagtgtctgggaaggcacccgttacttagcagacggtgaaagggagtctcctttccttggaggagtcagggaacactctgctccaccagcttcttgtggaaggctggatattatccaggcctgcccgcagtcatccggaggcctaaacccctccctgtggtgctgtgcttcagtgctcacactccttgtccactttcatgctcctcccgtactcctggctcctctttgaagttcatagtagatagcggtagaagaaatagtgaaagtcttaaagtctttgatctttcttataagtgcatggaagaaaacgctgacgtatgctgccttctccctctctctctgcttcggctacctaagagggaagggccccctctcctgtgatcacacgacttgcttcaccttgtcaatcacttcgaagattcaccctgcttaccctgcccccttatcttgtatgcaataagtatcagcgcgcccagccgttatgggccactaccggtctccgcgtcttgatggttgtggtcctccgggcccagctgttttctctttatctctttgtcttgtgtctttatttcttacaatctcttatctctgcacacggggagaacacctgcaaagccccataggaccctgcaggaatccacccccatgattgaattatctcccactgggtccatcccacaacacatgggaattatgggagctacaactgaagatgagatttgggtggggacacagacacaagccatatatcaaggttgttccttcagatgcagcaatcctgggagcttctggttaggacaagatacaagcagagacagcttcatgggtattgtaaactcaatgtttgtgtcccgacaaaattcagctgttggaacctaaccccaaggtgatggtatttgtaatacgggagctaaaaagaaattattgaggcagacagtgagggtaagagagtcctcagtaaggtttcctattaataaagagcagcccccaaataatttcttttctaacagaaagcagcctgaaacatcaagctgcaagcatagataaacaagctaaaatcttgcatcagctgtgccaatagaaaacggatgcctgggagccgggtatattcaacatggaggttccctcttcccttttctttgtccccacatgtgcagtaaaaaagcagacaacatggccccggccaggcagagaccctacctacgtaataaaagattagggtgggatggccagcttctttgggggctatgcaaacgtcatacctggtccgactaatctctcaggccctatgtaaatcagacagcacctcctcaagcttgtctataaaagccccatgcatttcaccacaaaaccaggggtcccactcgggaacccctctcttctctgtgcaaaagagagaactattctcttttctctttcttttgcttattaagccttcactcttttttttttttttttttttgagatggagtctggctctgtcattcaggctggagtgcagtggcacgatttcggctcacttcaacctccgcctcccaggtgcaagcaattctcctgcctcagcctcccaagtagctgggatgacaggcacccaccactgcgcccagctaatttttatatttttagtagagatggggtttcaccgtgttggtcaggctggtttcgaactcctgatctcaggtgatccgccccccactcggtctcccaaagtcctgagattacaggcgtgagccactgcgcccggcccagtctctttcactatgtaaggacacagcaagaaggtgccagctatgaaccaggaaaaaagccctcagcagacactgaatctaccagtgctttggtcttggacttccagcctccagaaccatgagaaataactatgtgttgtctgtaagctgccaggtctttggtatgttgatagcagcctggatggactaagacactctctccttccctctcatgccctggaccctcatcagggccagaagtggttggggtgatggcccaagcagactttaaaaagcactggcctagcacaagggttggcacgctagagcccacagcttgtttttgcaaataaaattttttgtttttaaaacaactttctgggctgggcacggtggctcacgcctgtaatcccagcactatgggaagccgaggcaggcggatgacttgaggtcaggagctcaagaccagcctggccaacatggtgaaaccccatctctactaaaaatacaaaaaaattagcctggtgtgatggcagaagcttgtaatcccagctactcaggaggctgagacaggagaatcatttgaacctgcggggagaggttgcagcgagctgagatcacgccactgcactctggcgcctgggcgacagagcaagactccatcaaaaaaaaaaaaactttctatagatacataatatttatgcatatttatgacatacatgtgatagtttgatacatgcacagaatgtataatactcaaattagggtatttaggatattcaccacctcaaacatttatctttttttttatcttttcgagacagagtctctctctgtcgcccaggctggagtacagtggtgtgatcttggctcactgcaacctctgcctcccgagttcaagcaattcttctgcctcagcctcccaagtggctgggattacaggtgtgcgccaccacacccagctaatttttgtatttttagtggagatggggtttcaccttgttggccaggctggtcttgaactcctgacctcaggtgatccacccatcttggcctctcaaagtgttgggattacaggagtgagccactgcacctggctcatttatcgtttgtgttgggaatgtttcaaatcttctcttctagctattttgaaatatacaatatattgctgttaactatagtcacccttctgtgctattgaacacttgaacttattccttctatccaactgtgtttgtgcccattaactatcccaccccttctagcctttgataactgactctctctttaccttcatgagatctacttttttagctcctacatgagtgagaacatgaagttgtaaataaagttttattctaacaccgccacacctacttgtttacatatcagcgatggctgctttcatggtacaacagcagagtggggtagtctcagcagagatcctacagcccacaaagctggacgtgttactctctggtccttttgttttctgccctctggtctaggagtttgcagctctgggcgttttttgtttttttttttttttttttttgagatggagtctcactccattgcccaggctggaattcaatggcgccatctcagctcactgcaatctctgcctcctgggttcaagcgattcttctgcctcagtctcccaagtagcggggattacaggcgcctgccaccacgtccaactaattttttatttttagtagagatgggatttcaccatgttggtcaggctggtcttgaactctgacctcagatgatccacccacctcggcctcccaaagtgctgggatgacaggcgtgagcccggccgttttcttttttgcttgttgtgcttcctggagatgctcagtaattcttacattctttcctggatagctggtcaatcattatttattatttccttgaattgttctaggaggaaatgtggggtagaaagagtatggtggggttcttgggcatgaataatccataaataagtcagatttctttttaagacgagaaacttaattttattgatatggacgaagagcaaggaaacacagtatctgcatctccagatttccgataaccttggccagcacgatcccccctcctttagtggccagggctgtcttcttgctacactttcagtgccgcatattcatgagatcctgggggctcctgggtggtgtctgaagctgcctcagacagggcgctggtgcttagctcagcataggtcactccttgggggtctgccgtctttggagaaaatagatgaatattagaactgagtgttcaatatggcagccactagccacacatggctattgacatttaagttaattacaattaaatttaatttaaaacccaggtcctcggtcacaccagatgcatttctttttcttttctgtttttataaccctttatgcctgtgacatcaatggatctgcgtaagccttttttcattttttttaaatttttatttatttatttattttgggacagagtctggctctgtcgcccaggctggagtgcggtggcgtgatctcggctcactgcaacctccgcctcccgggttcaagccattctcctggctcagcctcctgagtagctgggattacaggcgcccactaccacgcccagctaattttttgtatctttagtagagatggggtttcaccatgttaaccaggatggtctcgatctcctgacctcatgatccgcccgcctcggcctcccaaagtgctgggattacaggcgtgagccaccgcgcccggcccatgcataagccttttaaatggagattttggttcccattaggggagtttcgtgacttgtctaagaccacatgcgtgataaacagtatacatttctgtatgggcttaaccaggaggcacacacgaccagcccattgtggtgagggagctcttgtgggactcctaagcgggaggactcaccgagagagataccctttccatattggataaatctgcctctgagtgagaaaggaaaaaaaaaaatcagttctcagctgcagaagtcagaacttagtctttctatccggtgattcccttaaacttcccctgtcccttaccggcagcctcctgctccggaagtttggaatggctggttctgaaagagagagacacacgtgaaaggatgggatgtgaagatttcggggagagggtgagggcaatggaggggagaggaagggagaagaagggagaggaggaaggtcacagaatgggctggggtgggggctcagggtgccaatcccggatgtgccaatgggttcccttgagaatgacatgggaataagtggagcatgagctatgccaagcatctacctcttggtggattcctcagatgatgaacctacaaaaaatgcaggaggaatttacctaccgagaaaatccttcactccccctctctccctttgcgttctctgagctcactgtgctggctgcatctgtagatgatgaagactgagaggaagaggagaaggatggagatgcagctgaagatggcgacaaagatggttctggtgtctggagggggaagagcaggtcagggaatcagcctggctcctgaaatccactgataggggcgagccgaaaagctaagagaagccagacagatggcctggcttccaagcctggatctcccacctcggagctggaacttcctattgctttggggaatttccttaatcttctccaagcttctgtttccccatctgtaaagtgaggatagcagcagtagctactttattggatggtgggtcagtacctatagaaagggctggaacagtgcttggcgcataggaaattccaaaaattcccagggaatgtttggtgcatagcaatgatattgatcatttattgtgagccagctctgttccaggtgctccatatatatatatacgtgtgtgtgtgtgtatatatatatataaatgtatatatatgtgtgtgtatatataaatgtgtatatatatatatatatatatatatatatatacatatatatatatatatacacacttttttttttttgagatggagtcgtgttctgtcacccaggctggagtgtgatcctggctcactgcaacctccacctccctggttcaaacaattctcctgactcagcctcctgagtagttgggattacaggcgtgagccaccacatctgtctgtgtaatcactgtctgaaatccactgatggggtgagtagaaaagctaagagaagccagacagatggcctggcttccaagcctggatctcccaccttggagctggaacttccttggagctggacatttcgaccaatagactttgagtaaagcagatgacccactgtcataggggtgggcctcatccaatcagttgaagactttaagactttaagagaaaagactgaggtcccccaaggtggaaggaattctgcctccagactcaagctgcaatatcaagtctcccctggatcccctgcctgcctgccctgcagatttcagacttgccagctccccacaatcacgtgaaccaatccattaaaatcaatctctctctccatatatgtatatacatgtatatgttctcttttttttttttgagacaaagtctcactcttatcgtccaggctggagtgcaatagtgcaatcttggctcactgcaagctccgcctcccgggttcaagcaattctcctgccttagcctcctgagtagctgggattacaggtgcccaccatcacgcccggctaatttttgtatttttagtagagacggggtttcgccatgttggccacgctggtcttgaactactgacctcaggcaatctgcctgcctcggcctcccaaagtgctgggattacaggcgtgagccaccacacccagcttatatctatatgttctattggttctgtttttctggaaaaccctggctaacacagacatgatctcagctcttaacttcaaacatatttcctttttctttttttaaaggagagagagagatgtgaaaggacgggatgtgaagattatggggagagggtgagggcaatggaggggagaggaggggagaggagggaggtcacagatgggagctcaggatgccaatcccagatgtgccaatgggttcccattgttgcccaggctagagtgcagtggtgtgatcatactcgaattcctgggctcaagtggtcctcctcactcggcctccagggtagctgggagtacagaccaccacgcccagccaacttcaaacacacttcaatgagctcgttgatgccaggtaatgaacagcagtgacacgggcatggaaggcgtttagagtggggaggggtggggctctctgaaggagacatgattccccaagacacagaacaagggatcagctgggagaattcagggaggattcctaataagaacagggttagagcagggtagaaaagaatgaccagtggccgggcacggtggctcacgcctgtaatcctggcactttgggagagtgaagtaggtggatcacttgaggtctggagttcgagaccagcctggccaacatggtgaaaccctgtctctactgaaaatataaaaaataagctgggcatggtggcgcacgcctgtagtcccagctactcaggaggctgagagaagagaattgcttgaacctgggaggcggaggttgcagtgagccgagatcgcatcactgcatcatacactcaactgaccaagactccaactcaaaaaagcatccctctcaggagataaaatttctaccaattaaaaaacaaaaacaaaacaaaacaaaaaaaactagttcttgagcaatattgccatgcaagtctacatcatagcgttttaaagtcttaacaacaaccctgcaaggtagtacaattatttccctcccactggtgaagggcatgcattcccgtgtgactcctgggattacagcaagggttgtgtccaaagctcacagcgttgaggaagagagagcaacctgttactaaagctaggcgacagagtccatgcagttcccccccgttttttgtttttcttggcactttagattcaagaaacacaagtcgtgagactttaaggagtaagtagcagaaacgtgattaaggaaaaaagttgagcaactatagaagtgaggccccagaaaggggcttcaccaagacccccgctatctttgttagtgtgctttgagtctgagaatttttcctaggtgtgcaatgatctgtggtcacattacagagccaagtctgagatgcttcacacgcctggtcctctgcaccaacagagggtctcccatccagacgcttcccctacttggttcgctatgtttgcattggcatttctacatatctatatatagagaattacctatctaatttatctatctcgctaatctatctaccatctgtctaggtatctattatctatctacctatctatctttatctgtctctgtacctacttacctatcatctatccaatctatccgtcctatctaattatgatttatctatctacctacttgcctatcacctatccaatctatctatcctatcatatgtaattaactatctgtctgtctaatttttctatcttgttaatctatcacttatctaggcatctatgtatctatctttatctgtctatccacctgcttacctgctgtctgtctaatctatccatcctatcatatctaattatcacttatctatctaccgacttacctatcatctagttaccaaatctatcatctatctaatgtatctatcaatcataaccagttatctatcatctatcatctatcatctgtatgtatctgtctattcacctactattatctatttaatctattctatctagttatctatctatctatccacctacttatctaatttttctatcttgcaactctatcacctatctaggtatctatgtatctatctgtgtatctgtatatctatctatctatctagctagctttatctagctacctagttacctatcatctatctatctaatctatcatctatctaatgtatctatcaatcatatctaattatctgtctatctaatcatctatcttatctattatatctagttatctatcatctagctagctagctaatctatctgtatctatctacctacttacctatcgtctatttatctatctaatctatcatatctagttatctatctacttacttatctaacctgttgtatctagttatctatctacctacttacctatcatctgtctatctatctaatctgtccatcgtatctagctacttatctacctatcatctatgtatctatctaatctatcatatctagttatctatttatctgcctacttgcctattatctatcacatctaattatctatctatccccctccctgaaataaggttctttctgagctgatcatcagggagcagcaaaaggagtggggagtttgaaacaagacatatttgagttctagtactgggtctcctacctcctgactttgtaaatgttcccttccctttctggaatacgttattttttggttaaatataaggagggggcagagagctaataatatctaacttgaagagttaggtaatgatgaaaaatcctggctttaaagcgctcagtctagaaactgactcattgtgtcggataatgggattgtaggtataatgatgattttttttcacccaatattccacctacacccatctctctctgtaatagattctgtcaatgttcctcaacccatgttccccagatccctttcccatttttatgcattctagatcgtggcttctttccctttccaaagtgaacatttgtatctcttctttgggggactgcctgggagaactccaaatgccttggaatttacatgcccgggacaaactgccactgacggctgtggggaccccagctccctagcctctggtcttcgaccttctctgtctccactgctttctgcaggatggagccaaagataccatctgagggacacagatatcccacacttgtttaatctattttcctcccagcccttcttccccactccctaaaatgtaattttcaagccaggcgtggtggctcacacctgtaatcccagcactttgggaggtcgaggcaggcagagcacctgaggtcaggagttcgagaccagcctgaccaacatggagaaaccccgtctctactaaaaatagaatattagctgggtgtggtggtgcatgcctgtaatcccagctatttgggaggctgaggcaggagaatctcttgaacctggtaggcggaggttgcagtgagccaagatcacgccattgcactccagcctgggcaacaagagcgaaactctgtctcaaaactaaataaataataaataaaataaaacgtcactttcacactaatgctgtctaagagcctgcttctggtggagctgaatcagagaacccctcaaaagcaacaatttttttttttttgagacagtctcactctgtctcccaggctggagtgcagtggtacaatctcggctttggaacctccccctctggggttcaagcaattctcctgcctcagcctcccaaggagctgggattacaagcacccgccacctcaccccgctaattttttatatttctagtagagatgaggtttcaccatgttggttaggctggtctcaaactccagagctcaagtgttctgcccactttggcctcccaaagtgctgggattacataagccaccatgcctggccataagcaacaattctatcagtgcatctccaaggacttatgaaaacagggcaggaacagctgctcctggactctcagtttccccagatggaagcagagaaacagcagccttgccttgtcctttctgttctccccttttccagcctacggtatctttcacacagcaattcactagaaatgagaagtacattattgcaaaattctcatcttcatatgaccccataatcagctgaactgggttcaccctgagatgtccacagatcctggccaaatgttgcatcagtatttgcaaattgccagaataaatcataacttgctacgctactaaagtcagcgtgagcaacaagatacagcctgacacggggcataaatggaggcacaggcaccagaaagaaagtcaagtcttgtgtgataaaattcatcttcattctctacattgcgattgaacatagagtcgttttctagtgtgttttaggcatataaatacaggctggggacatcatacctgtgcttacagatattttacttttattttatttatttactgaaacagggtctcgctctgtcacccaggctggagtgctgtggcgcaatcacagttcactgaagcctcaacctcctgggcgcaaacgatctttctgcctgagcctcccaagtagctgggactacaggtgcacaccaccacgcctggctaatttttgtattttttgtagagatgggatcttaccaagttgtccaggctggtcttgaacccctgggctcaagtgatcctcctgcctcatcttcccaaagtcctggtattacagacgtgagccactgcgcccggcaaagatattttattctgtttagaattgtgatgatacaaatttgaactcaaaaagtacattttaagaaattatataatacccactgggatggctataatttaaaaaaagaaaagtaagtgttgacaaggatgtggagatattggaacccacatatattactggaaggaatataacatgatacagccacaatggaaaatgatttggcagttcctcaaaaagttgaacataatagtcaccatatgtcctagcaaatccacttctaggtacatactcaagataatttacagcgcggagacaaacagatactcctaccacagtgttccagcaccattactcgctttagccaagaggtgcagacaacacaaatgtccatcaaaagaagaacggggccaggcacagtagctcaagtctgtaatcccagcactttgggaagctgaggcgtgtggatcacctgaggtcaggagttcgagaccagcctagccaacatggtgaaaccccctctctactaaaaatacacaaattagctaggcatggtgacgggcgcctgtaggtccagctactcaggaggttaaggcaaaagaatcacttaaacctgggaggcggaggttgcagtgagctgagattgtgccactgcactccagcctgggcgacagagcaagactccgtctcaaaaaaacaaaaacaaaaacaaaaaaaagaatggataagcaaaatgtggtctatccatacaatacgatgcttttcaccatgacaagaaatgaaacattgatgcatgctacagtacagacaaactttgaaaacattatgctaaagagaaaggagctagtcacaaaggatcacatagtgtatgaatccacttacacaaaatgtccagaatagacaaaatcatagacacagagaagcatatgaatggttggaagggcctggtgggaaagtgggaaatgaggagtgactgcttaatgggtacaagattttcttttagggtgatgagaatgttctggaattatgtagtggtgatggttatactacctcatgaagatacaaaatgccagtgaattggacactttacaagggtgaatttttggactgtgaattatatatcaataaaaaaagaaagaaaataaatgatacaagagctcaaaatagaaaagcttctcttcctcctccccctcacacctcactagatctcccacctcgtttctgatacttctgtgttcctctctcccattagatttcatatctttctcagaaaacgttcctgacgtgaattgtgttcgtagtgctagggtagcagacatttcccaagcctactatcatggaataaaaacgtttcaaatagttatcttgcaagaacactttggaggatacctttttgaaaaccgattataccagcacagactgctagcaacaaccttcagcaactttggctctttggagtaggttgcaggaagattatgacttgctgaaaggaaggatgattaagcatctagatgccaatttatattctgcatttggcccttaaagtctggatgagttcctgtttcagccgaatgctgccaaaagctctaactttttaattttttttttttttttttttttttggagacagagtctcactctgttgcccaggctggagggcagtggtgtaatctcggctcactgcaacctctgcctcccaggttcaagcaattctcctgcctcagtcacttgagtagctgggaatacaggcgcccaccacaatgcccagcaaatttttgtatttttagtagagacagggtttcaccatgttgcccaggctggtttcgaactcctgacctcaggtgatccgcccacctcggcctcccaaagtgctgggattacagatgtgagccacctcgcctggcccaaaagctctaatttttatgagaaactctgaggacagaatcttagtcaattgttaatgaataagcaacattagaaaaaaaattcaatattcacctatttttgagaattttagagttataacaaactcttgattatatatattcctgaagtacctactctgcgtaggtcctggtcctactccccaaatgggtcactgaaaaattcacccccattattccccaaatcccaccctagtttttcatcatgtcatatggcaaacaacgcactctgtgctgttttacacaccagcttcttcagaacccggaagcactttagaggttatctcccctcatcctccaccccccaaaacacagcagtttccccaataacattgagaaaatgggctttaaagttcttctaggccgggtgcggtggctcatgcctgtaatcccaacactttgagaggccgaggcgggggaattgcttgaggtcaggagtttgataccagcctggccaacatggtgaaaccccatctctactaaaaacaaaaaacaaaaaacaaaactgagctggatatggtggtgggtgcctgtaatcccagctattcgggaggccgaggcaggagaattgcttgaacccagaacccaggaagtggaggttgcagtgagctgagattgtgccacttcacgccaccctgggggacagaacaagactctttctcaaaaaaataaataggccgtgtgcggtggctcacgcctgtaatcccagcactttgggaggctgaggcgggcagatcacaaggtcaggagttcgagaccagcctggccaacatggtgaaaccccgtctctactaaaaatacaaaaattagctgggtgtggtggtgcgtgcctgtagtcccagctattcgggaggctgaggcaggaaaattgcttgaatccgggaggcgaaggttgcagtgagctgagattgcgccactgtactccagccttggtgacaaagcgagactctatctcaaaaaacaaacaaacaaacaaacaaacaaataaataaagttctccttgtgcactttaagcaaaggtgatcatgaagcagatctcattgggaaaaacatctcctttctaattatcttacctgttttcattgagggagcttcaagttcatcgtgtttatctagaaaataggagggaagaaaaggaattacactaatcatacaggaaccttggggacaggagtcctcacgtcctacttatagacatcctgttcttctttgggaagcagaaaagagaatggcttctccattccctagatgctccctgggtcctcagagcatggacagagcctcagattactcttcttaatagtcctggagtttgatagtatttttaataacaaaaatatttatgaatgaccctgctaacgccccctccagtttgattccttgccagtcttctctatcttgacaaagaacaccattcacccaaattctttctttcttttattttttttgagtcttgcactgttacccaagctggagtgcagtggcatgatctcagctcactgcaacctccgcctcccgggttcaagagattctcctgcctcagccttccaagtagctgggactacaggcgcccgccaccacaccctgctaatttttgtatttttagtagagacagggtttcaccatgttggccaggctggtctcaaactcctggcctcaagtgatcaacctgccttggccactcagaatactgggattccaggcatgagccactgcacctggcctatatttctatctccacagtggcaccatttagtctaagttaaaatatcacctacttggccgggcgcagtggctcacgcctgtaatcccagcactttgggaggccgaggcgggcagatcacaaggtcaggagatcgagaccatcctggctaacatggtgaaaccccgtctctactaaaaatacaaaaagttagccgagcgtggtggcgggcccctgtagtcccagctactcgggaggctgaggcaggagaatggcgtgaacccgggaggcggagcttgcagtgagccgagatcgcgccactgcactccagcctgagggacagagccagactccgtctcaaaaaaaaaataaaaataaaaataaaaatgaaatgaaatatcacctactcaccagtccctggcaaccaccagttgcttctgtgagtttggcttttttagactacacatatgagtgagatcctgcagaatttgtctttctgagtctggcttattttgtttagcatgatatatgcggagatgttgatgaaagggtataagtttccagttctaagatgaagaagttcaggtgctcagcatggtggcaatggatgtgctaattaatttgactgtgataatcattacacaatgtacaggtggatcaaatcatcagattgtataccttgaatatatacaatcttcatttgtcaatttgatatttttaaatttaaaaagtcgtattgcctgaaacgcaccaactcttactacatctagtcccttattttccaaaagcagccagaggccgggcatgatggcctgtgcctgtaatctcagatgcttgggaggctgaggtgggaggattacctgggcctgggaggtcaaggctgcagtgagctgtgattgcaccactgcactccagcctgggcaaccgagtgggaccctgtctcaaaaaaaaaaaaaaaaaaaaaagcagccagtgacccttccagcatataaataaaatcatgccatcctccagctcaacttcatcagtgggttcctgttctttcaaagcagactctaggaccagttcaaacacccacaagatcctagatgctctaggccctgccttatgtcctcctttctgtgtctcaatcattccaggaacactcacacttctgagactttgcttttgctgctctctctccctggagggctgttctccagatatcggtgtggttgggtcattctcatccttcatgcttgtggcagatagaccctaagggggcactcaggagactcaggagccctgcttcctggtgttcatgcctttgtctaatcccctcaccttgagtgtggagatctgtgactttcttctcaccaatagctatggcaaaggtgatgggatgttatgctcttgattatgttacattacataaaactctgtttgctagggcatttgctctctctttcttctctctctctcaatctctcttcttgcaagtgctgcagaatcattctagcatgaatcctacagctataaagaaccagatattgctatcaaccacaggagtggagaaatggacccttccccagtcaagcctccagatgagccagatgagaacacagcccttgttgacaccttgattgcatccttatgagacccaaagcagaggactcagctaagctgtgcctggactcctgacccacatcaactgtgagataataaataggtgtttcaggctgctaaattagtggtaatttgttatgcagctgtagatcactaatacaatgcctctcacagttattctccatctataatgtgttttttaattactctgatagcttgctcttatttctttctttcttccaaagaagaatgtgagctcctgttggccagagacctggtctgtctcagttcctacaatatgctcaggatctaccaaagtatctgaatttgtagggtgaatgggcagctatttttgtgccaggtattttgcattaatttttttttgtaatggaagcatttatatgcccattttgtaataagtaaaaagtagtataataaaaaagtaaaaagtagtataataaagtgatttgcaaagcagcaaacagattgtatatggaaggctgacctggaaaatcaaccactggaaattgatactatagcctgtcttgtgatgtaatggtacagctgcgatagaggtgaagaaatcaggaaacagtagatgatatgccagagaacataattgggaaatggcaaataatcgcgaggcttttagggctaaagtgtgggtgcagaaattcttaagactacaagaacgagttatggggaatacaatttgaaatcaatatcaaagtgatgagcaccttgttggagtatcattgatcaagagcctcagaaagagggtaaatcagaggtgaaacattaagtattcagttactcatcatgccccaagcccaggctaagtcattggtgtggacccacggctacttctacactacactgatgactgtaaagtctctccagggatttcccatgatatggcaggactgacctactggaagcaactgtggtcagttgagaggtattgtttagtgactaataaatgaatggatgaatggatggatggatggatggatggatggatagatggataggtgggtgggggtgagtgaatgggtgaaagggtggatgagtggatgaatgggtggaaggatggacaaatgagtggctgggtaaatagatgggtaggtaggtagatagatggatgaaggggtgggtggacagatgaatggaagggttggtggttggatggattaatggatagatgaatggatggatggatggatggatggatggatggatgagttgatggatagatggataagtgagtggatggatgggtgaatgagtgggtaggagggtggatgggttggtaggtgggtagatgggtgggtgggttgatagatgggtgggtagattgatagatggatgggtgagtagataaatgggtagatgaaagtgatgcaaaattattctttatccctcttccttgggatctcaagtcatgtatgttacaatcctcccacgtgcatcttctcactgtggtcctcatcatttttttttcagttacctgcaccgtgcctcccatacttttccacacaatgggatctcttagccccacaatccattatttgccattcctacatccctcatagagcactggacactctttctggctttccttctctggcataatgaaatataaattttcatttatgtctgaatagcaactgtgaagctcattgtttttgtgacaccggggaggtcacctaatctctatgagcaaaaagaagttagtaacacaaccaccctcataggaagtgaagactgaatgagttagtggaggcaagttacctgtcgtggagacaggaacatagaaaatgctggatacatgtcaaatgccagtgttatcactctatcctcacctgtcacccagatctccagcttgttgctggggaaggaggccaagtgtgatgagttgctcaggtaatacacacagctgtagtttccactgtcattacttgtcacgttccagagcatgaaatcagtctggttttttcttacttgcctgacttgtaatggttctgggatccccattttcaacagagcaattacaatacattcggttccattgtatggagtgagacatcgaagtgtcctgagacctggagtcatcccagggtctacattgactgagagcaaaggttctgggagtgatcctgaagaggacaaggcaatggaggtaaagagaagggccagggcttttccattttctactgcacttggggactatctcatccatctctccgtattaaccatgtctttcatcttctgcatttgatgctttaacatcttggggccttgctgcccttggtgggacctcccctcgcagggttagttaatttctagagccagtaaacaacttgtcctcaaggatgtccctcaaatgcaagccaatagatccagagcccatactctcaaccaccttaattatggggctctcacactcaaggtcaatgttgtcctctcctaatcaccccaggtccaagaactagacaaccagggacagcctctacaccccaaagccaattctttttttgtttttcttttctttctttcttttcttttcttttctttttttttttttttttttttttttgagacaggttctcattctatcacccaggcttgagtgcagtggcacgatcttggctcaccgcagcctctgcctctggggttcaagcaattctcgtgcctcagcctcccgagtagctgaaagcacaggtgcacaccaccacacccaggtaattattgtatttttgtagagatggagtttcgccatgttacccaggctgatgtcaaactcctgacctcaggtgatccaccctcctaggcctcccaaagtgctaggattacaggcatgaaccaccacacctggccaactctaatcttgttctccccacaaaatacaatcaaagctctggtccacagttcttcctcctccctctgcccctcattgaccctggtgcttccccacatactccccccagtatagccttcctcctcctcttgggaactgtaacagaccatcttttccatggcaatcatcacttggtctgtcagtcttaccataccccaattttctattaactgaccatattctacaccaccctcccacatccacatcattgggaccctctcagaatctctgatgagaatcttgctccacattcggttcccatttccacattgaaggtgttgcatctatccttcttcttcttttttttttttagacggagtcttgctctttcatccaggctgcagtgcagtggcacaatctcagctcattacaacctctgccttctgggctcaagagattctcttcctgcctcagcctccctagtagctgggattacaggcgcctgccaccacgcccagctaatttttgtattttaagtagaggtgaggtttcaccatgttggccaggctggtctcgaactcccgacctcaagtgatctgcccacctctgcctcccaaagtgctgggattacaggcatgagccaccgcgccgtgcctggcctgcatctatctttttgtctcctagattccttcttccccagccatgtcccacgacaggaaaagaaatacgtgcatcaggcaggctttggtgactcacgcctgtaatcccagcactttgggaggccaaggcaggaggatcacctgagctcaggagttcaagaccagcctgggcaacatagatcctgtctcaacaagtaatttaaaaattagccaggcatggtggtgcttgcctgtactcccagctacttgggaggctgatgtgggaaaatcgcttgagcctgggaggtcgaggctgcagtgaattgtgttcatgccactgcactcctgcctgggtgacagagcgagattctgtcaaaaaaaaaaaaagcagccgagcgcagtggctcactcctgtaatctcagcactttgggaggctgaggtgggcagatcacttgaggtcagcagttcgagatcagcctggccaacatggtaaaaccctgtctctactaaaatacaaaaattagccaggtgtggtggcgcacccctgtagttccagctactcgggaggctgaggcaggtgaattgcatgaacccaggaggcgggggttgcagtgagctgagatcatgccactgtactccagcctgggcaacagagcaagactccctctcaaaaaaaaaaaaaaggctgggtgtggaggttcacgtttataatcccagccctttgggaggccgaggcagatggatcacttgaggtcaggagtttgagatcaacctcaccaatatggtacaacctcatctttattaaaaatacaaaaattaggccgggcgcggtggctcatgcctgtaatcccagcactttgggaggcggaggcaggtggatcacaaggtcaggagatggagaccatcctggctaacatggcgaaaccccatctctactaaaaacacaaacaattagctgggcgtggtggcgggcgcctgtagtcccagctactcgggaggctgaggagggagaattgcttgaacccaggaggcagaagttgcagtgagccgagatcgtgccactgcactccagcctgggagacacagcaagactctgtcttaaaaaaaaaaaagcaaagccaaaccaaagaaatgtgtgcatcaaagagtacatctgcccttctcacctgtgaccaccagctgcaagtgttcactgctttctgaccactcatgggaggctgttgtcttgtaggcacaaaagtacctcccagcatccttaggcttcaggtccgtgaaggggaattcagcttcgttttctgccgagctctgttcctgcttgtacccagagtcgttcaccttgcgcagcacaaatgtcacattctgggaatgagcctgacacttcagggtcacattgctctcggcttcaaccaccgagctgggccaggcgtggagggagggcttgggcggtttctctggaaacaattcagagttaatttgagtctagaattcagacgattaaaggaaaaggtcatgaagcgtgggatgcaggaataaaagtttaagtaggagaaaactcaccattctttttctcatcttcgtagcccagacacagccctggaagagaaatctcaatgagagaaaaattatgtgcttgtccttgagtacaaatccagcagagaacgtatgactagctctttataggtctgagatatatatatatatataatgtatatatgtattatatataataaatgtattaagtatatgtacacatattacatataatacatatataaatataatatatatattaaatatatgtattacatatatgtatatatttttggcagatatctccccagacttacctcttacttttgttccattgtttgtcattcagaagctacgtgtatggagaaaattccagcaacttcttctttctttttttttttttttttttgaaatgtagtcttgctctgttgcacaggctggagtgcaatgacatgatctcagttcactgcaacctccgcctcccaggttcaagcaattttcctgcctcagcctcccgagtagctgggactacaggcacccgccaccacacctggctaatttttgcatttttagtagagacagggtctcaccatgttggccaggctggtcttgaactcctgacctcaggtgatccacacgcctcggcctcccaaagtgctgggattacaggcgtgagccactgcccccggcccagcaaccttttctgatgtattgaattgctttcatgagtaatcctttcaccatctagaaattgttcaacattcacctatgcttttttctggtattttctgtgattgcagtgttttgttttgttttgagacagagtctcgctgtgtcacccaggctggagtgcagtggtgcagtctcagctcactgcaacctcctccaccccctgggttcaagtgatactcgtacctcaggctccagagtagctgggactacaggtgtgtgccatcgtgcccagctaatttttgttgttgttgttgtagagatggggtttcaccatgttgcccaggctggtctcaaactcctgagctcaagtgatccacccgcctcagcctcccaaagcgctgggattacaggcatgagccaccgtgcccggcctgattgcagttttacccttgccacttaaataatgcaaaggttattttatcgtggagtgagagtggtgggttttttttttttttttatttttcgagatggagtctcgctctgtcacccaggctggagtgcagtggcgcgatctcggctcaccgcaagctctgcctcccgggttcacgccattctcctgcctcggcctcccgagtagctgggactacaggcacccgccaccaagcccagctaattaatttttttgtatttttagtagagacggggtttcactgtgttagccaggatggtcttgatctcctgacctcgtgatccacccgcctcggactcccaaagtgctgggattacaggcatcagccaccgcgcccggccgagaggagggttttcttgctcaattccaatagagagaatctgctcccccttccccgtgtcttctggtcccaaatactctcctcactttagctttggtttccacttacattatcccctccctcttctgtgttctgttctctacattccccgctgggaaggtagcgtcttaaacttgggtggaaaatgggatgtcagtcatggggcttgtttcagggtgaagttacgtagaatttaggtagaaattctctagagccacgacagtgtctcaggacattggttccttgttgacacaggtgccgatacagaacgtgaccccccaccaagcttcaccacagaggaatgaggtggaggcctcacgatggaccgaagctgcgttggcagcgagattagctgggattggcaggtaggaaacagcctctgggtgggcagggcatcccaggactcaggctctgttttgagaccctccccaaatcccgcttttagattcatgtcatctcatctctgctatccacccatcgtctgttcaaacagtgattcctatattcttttttctttttgagacagggtctcactctgtggcccaggctggagtgccagggtgcagtcacagctcactgcagcctcaacctcctgggctcaagtgatccatccatctcagcctcccaaataactgggactacaggcatgcaccaccacgctggctgattttaaaatttttttgtagagatgaggactcacgatgttgcccaggctggtctcgaacacctgagttcaagtgattctcccaccttggcctcccaacatgctgggattacaggtgtgagctacctgcacccagcccaattcccatattctttttcttttctttttttttttttttttttgacatggagtctccctctgtcacccaggctggagggcagcggtgctatcttagctcactgcaacctctgcctcccaggttcaagcgattttcctgcctcagcctcccgagtagctgggattacaggtccttgccaccatgcccagctaatttttgtatttttagtagagacggggtttcaccatgttggccagtctggtctcaaactcctgacctcaagagatctgcccgcctgggcctcccaaagtcctgagattacaggcgtgagccaccacacctggctgatttgtgtttcttgaaaagagaagttcaagttgtaactcccaggacctgcgaatgtgaccttatttgaaaatagcattgtctgatctttgcagatgtaattaattaaactaagatgaggtcatactagagtaggctgggtatctaatccaatataacttacaagaagagaaaaagagagacagagacacacagaaggaagacggccatgcgaagacagaggcagagaggccaggctgcaatcatagtgctttgggatgccaagataggagaattgcttgagcccaggagttggagactagcctgggcaatatagcaagatcccatctctaaaacagaaattattttaattagtccaacatggtggtgtgcacctgtagtcctagctgctcagaaggctgcggggaggactgcttgagctcaggaggttgaggctgcagtgagctatggtggtaccactgcactccggcctgggcaactgagtgagaccctgtctaaagaaaagaaaaaaaaaaacagagccaacgattggagtgatgcatctacaagttaaagaatgccgggagcgctggctcacgcctgtaatctcaacagtttgggaggctgaggcgggcagatcacctgaggtcaggagttcgaggccagcctggccaacgtggtgaaaccctgtctctactaaaaatacaaaaattagccaggcatggtggtccatgcttgtaatcccagctacttgggaggctaaggcaggagaattgattgaacccaggaggtggaggttgcagtgagaaagatcatgccactgcactctagcctgggtgacagagcaagactccgcctcaagaaaaaaaaaaaatgccaagaattgtcagccatcactagaagaggggcataaaacagacgctccttcatagttctcagaaggaatcaacattgcaaacaccttggtttcagacttctcatctccccaacttaaagcaattctaattcctttaagccaccaggcttgtagtactttggtatggcagccattgggggatgaggtcagtctcctggttgcccagcttactgtgctcagcagctggaggcttgggtatgaacccgatagtcatctctaaggcacaaatagccgggtgcagtggctcacacctgtaatcccagcactttaggaggttgaagtgggtagatcacctgagttcaggagtttgagaccagcctggccaacatggtgaaaccccatctctactaaaaacacaaaaaattagccaggcgtggtggcgtgtgcctataatcccagcttctcgggaggcggaggcaggagaatcgcttgaacccaggaggtggaggttgcagtgagctgagatcacaccactgcactccagcctgggagacaaagcaagactctgtcaaaaaaaaaaaaaaatgctcatctaaggtgcaaatgtgtgtaggagacgagcattaccccacaaggaagggctgcacccagaaaaggaggaaggaactgaagcagacgaagcacgtcgatgtccaccgcaccccccgtgcaccagggaggaactggggccttagggaggtggagctctgctgggtcaagcctagagtttctatgtagtaaagccgagattataacccaggtcatccgtttcacagtgtgagctctgtctgaatacatcaggttcaattggaggatggttaaaatcagcctaagaatcgagctggtcagaaaattgtcttcttggggccaggtgtggtggctcacgcctgtaatcccagcactttgggaggctgaggcgggcggatcacctgaggtcaggggctcgagaccagcctgaccaacatggtgaaaccccgtctctacttaaaatacaaaagtcagccgggtgtggtggcctgcacctgtagtcccacctactcgggaggctgaggcaggagaatcgcttgaacctgggagacggaggttgcagtgagcccagatcacgccattgcactccagcctgggctacagagtgagactctgtctcataaataaatgcatacatacataaataaataaataagagagagagagaagaaaattgtctttttgcccacagccttgcaccctgtagatccctaagcccagccctcctctattccgacggaggatgatggcagtactgcggtatttagcggctgcagactcggagaccccacagcagctctgcctttcccagcggagtctgtccccgtgtctctgcagcgcggcctcctcctcgcttgcatgtgggcggcagaactcacagaacccacagcccagacccacccaccgcaggtgtgcaacacctggaagtcattacttccacacaccgcatttccacctggactgccactcccacatgagtttttctcaccagcccaagcccattcgtcccagtcctggagactcaccgaggcaaagcagggagaggaattctgcggtcatagcgtcccttctgccagaaccaaggccccgccttgggttttacccttcaaaggcggagcgggactgggccggccgcagctctccggctgcccggttcgtccccaggatgtgcagatagaggaggttttgctctgacactctggttctctgccccactcttgcagtttccttctcacaaccgactcaggaaacaagaagccgtcgatgataacttcttccccatgaatccggtgtgtgtggccccacccgcccgagctctgtcctaccttatctgaagttctgccaagagttttctgtaaatgtaattttttattttaaaacactaataccggccggacgcggtggctcacgcctgtaatcccagcaccttgagaggctgaggcgggcggatcacctgaggtcgggagttcaagaccagcctgaccaaaatggagaaacccccgtctctactaaaaatacaaaattagccaggcatggtggcgcatgcctgtaatcccagctactccggaggctgagacaggagaatggcttgaacccaggaggcggaggttgctgtgagccaagattgtgccactgcactccagcctggacaacaacggtgaaactgtctcaaacaagcaaacaaacaaacattaatacctatagctttatagcttccgtgtacccactagccagctccccacaatgttaacctttttttggggggcgggggggacagagtcttgctctgtcacccaggctggagtgcagtggcgcgatctcggctcactgcaacctctgcctcatgggtttaaggattctcctgcctcagactcccaagtagctgggattacaagcatgcaccaccacacccagctaattttttgtagagatgggatttcaccatgtgggccaggctggtcttgaactcctggtctctagtgacccgcccacctcagcctcccaaagtgctgggattacaggcataagccactgtgcccggccaatggtaatctcttataattacagtactttttttttttttttttttttttgagacagaatctctgtcagccaggctggagtgcagtggcacaatcttggctcactgcaacctctgcctcccgggttcaagcgattctcctgcctcagcctcccgagttgccgggatgacaggtgtccgccaccactcttggctaattttttttgttctttttagtagaaacgaggttttgccatgttgcccaggctggtctcgaacttctgacctcaggcgatccgcctgcctcggcctcccaaactgctgggattacaggcgtgagccaccacgcccggcgtatggcacattttcaaaaccagagactttgcactggcatcacacgtttaaccaggttccagaggtcactcagatctcaccagtttgtgcataattcgtttctctttttctcttcctcttccttctatttctatttccttttctccttttccttcttttctcctgctcttcctcctcttccaccttcttttcctcctcccttttctttgcctatgggtatagttctgtaacattttattgcctgtatgtatggctttatagaaccaccgccacaatcaagacacagaactgtcccaccaccacgtaggaactccctcatgctgcccctttataatcgctctcccaccctagcacctgctaatctgttctacgtctctatcactttgtcactttgagactcttgtataaatggaatcgtccatcgcctcaccttctgagggtgacctttttcactcagcacaatgcctgtgagattcattcaaatggttgtgtgttatgatgatggatacattagccgggcgtggtggcacacgcccatagtcccagctactcaggaggctgaggcaggagaatcgcttgaacccgggaggcggaggttgcagtgagctgagatcacgccactgcactccagcctgggtcacagagcaagactccatcaaaaaaaaagaattatctaatggatacaatgtgtgtcactgggttagtggatacctgaaagccctaacttcatcattttggaatctatccatgcaataaagttacacttgtaccccataaacgtatacaaataaaaaataatcgtctgggcatgatgacttaccgctgtaatcccagcactttgggaggctgaggcgggattacaggtgtgagccaccatgcccggcctatactttctatcttaataactacaaaaataataacttgctggatgggtccctgtgcccaccccgtcctgtcctaagtgaggaggatgggaagaaagccatcgtcctgtcctggtgcggctctcaaacagctggaaatgctggctgcacaggaaactctaaggatcggcagctctagcgcatgctacccttggcagctgtgtggtctgtggatagagaaggaccaacctgtggttagtggaggaagaggaggaatattgctttgataagcacatcctcagagttataacagaggagacaatagttataaaataagaatgatatttacgaaaaataataagactattaacaagaaacagcaacaaatcttgaaaacaaaatgtaacaacaaaacataaatgttgactttttttttttttttttttttgagacggagtctcgctctgtcgcccaggctgcagtgcagtggtgagatctcggctcactgcaacctctgcctcccgggttccagcaattctcctgcctcagcctcctgagtagctgggattacaggcatgcaccaccacgcccagctaatttttgtatttttagtagagatggggtttcaccatattggccaggatggtctcgatctcttgaccttgtgatccgcccacctcggcctcccagagtgctgggattataggcatgagccacagcacctggcaactgttgacattttacatctgcaccagtaagactggctaccaattacaagcaaatggatgccatggatagaatggaattcctgccaaactgggtaaaatgttggaaacatataaaataaaatgtaaaagaaatgtattataaatacaggctgggcgtggtggctcatgcctgtaatcccagcactttgggaagccaaggtgggcagatcacttgaggtcaggagttcgagaccagcctcgccaacatggtgaaaccccgtctctactaacacacaaaaattagccaggcatggtggtgggcgcctgtaatcccagctacttgagaggctgaggcaggagagtcacttgaacctgagagggaggttgcagtgagctgaaattacgccactgcactccagcctgggtgacagagtgagactccctctccaaaaaaaaagaaagaaagaatgtattataaatacatatgaccaagcacagtggctaacgcctgtagtcctggcactttgggaggccaagatgagaggatcacttgagtccaagagttcgagaccaagttgggccatatggtggaacccggcttctacaaaaaatacaaaatttagtccggcatgatggcacacacctgtggtcccagctactcagaaggctgagatgggaggattactttagcctgggaggtcgaggctgcagtgagccgtgatctagccactacactccagcctgggcgacagagtgagaccctgtctcaaaataaataaatataataaataaataaatatgtatatcccaatattggactaaatgctggtccagaagcacaaaatagaaagaacggagaggaagtattaataaatattacacaggaagcaatgtttttcccttcgtgtggaggaagagttccccgcaggtgagagtcacctactactcaatctgactctgaagttttaagtattgattcaagttatcaaaaatgtattaagggctgggcacggtgactcaagcctgcaatcccagcactttgggaggccgaggtgggctgatcacttgagctcaggtgttcaagaccagcctggccaacatgggtgaaaccccatctctactaaaagtacaaaaattagctgggcatggtggcaggcgcctgtaatcccagcgacttgggaggctaaggcaggagaatcgcttaaacccaggaggtggaggttgcagtgagccgagatcttgccattgcactgcagcctgggtgacagagcgagactccgtctcaaagaaaaaaaaaaaaagtattacgtggctcattgtgcccaattctgtcctctgtccccagtgaaaagtacaggaagaagaaagccaccatcctgccctacagcagatcccaacagagctgagagtgcaggttccacagaaagcggttaaggctcagctggtccaacccatcattccctgggcagctgtgggatctatggctagagaagaacagagctgagcttagaggggaaggaagaggaggaagattgttttctcccggcatccaaacacagcttttcaaccagggggagcaccaccctcacttcccatcgccccatccagggatatttgaaaggtatgagagtagtggcttttttgttgttgttgtttcacaataattaggtctccaacaggtgttcaatgggaaaggaagtattagcaatgtcgagttacgtgttcctataatggacaagacagtctcacatggtgaaggactattgcactttaaacaccatttgtggccatgcccggtggtgcacacctgtaatcccagcactttgggaggctgaggcaggtggatcacttgaggccaggagttcgagaccagcctgaccaatgtggcgaaaccccgtctctcctaaaaatacaaaaaaattagccagatggtggcaggtgcctgtagttgcagccacttgggaggctgaggcaggagaatcacttgaacctggcaggcggaggttgcaatgagccgagatcgcaccactgcactctggcctgggcgacaaagcgagactctgtctcaaaacaaacaaacaaacaaaaaaacaaaaaataccatttgtgcccatgtggagaaacgtgtgaagtccccatggtagagtctgatgtttaaagaaccccatatggattgaatgcacagcagggcggctacagttcacaaggctgcactgggtaattacaatttgctaagaaggtggatcttaaacagaaaggtccataagctagattgagataaccattgtcacaatgagtgaaatttcttcctcggcacacaattaattacttagttagtaggaaagttcccagaaggtggatcttaaacagaaaagtccattagctacattgtgataatcatgtcacaattagtgaaatttcttctttggtacacaattaattatttagtagggaggttcccagaaggtggatcttaaacagaaaggttcgttagctacattgtgatactcatgtcacaatcagtgaaatttcttccttggtacacaataaattacttagtaggagggttccccacccgtaggcttatgggggtataattgataaatcaaaatggaatatatcaaaacatcacgttgtacacaaatataactccatttttatttgtcgattagatctcaataaatctggagcagaagagaattccatatctctacagcagcccatgaaagagagaggggatccgtgttttaacttggatctgttactggaaaggggtcccagtccagaccccaagagagggttctcggatctcacacaagtaagaactcagggtgagtacacagagtaaagtgaaggcaagtttattaagaaagtcaaggaatatggctgctccataggcagagcagtccagagggctgtcagtcggctatttttgtggttatttcttgatcgtatgctaaacaaggggtggactgttcatgagttttccaggaaaggggaggggatttccctggaactgagagtccctccctcgtttagcttctggaagttgccatggcatctgtaagctgtcttggtggcggtgggagtgtcttttagcatgcaaatgcattataattagcaaataatgtgcagtgaggacgaccagaagtcacttttgttgccatcttggatttggcaggttttggctggcttctttgttgcatctttgtgtctttgggtctttgtgacctgtatgttgtgacctgtctcatcctgtgacttagaaagcctcaaccccctgggaatgcagtccagcaggttgcagcctcagtttacccagccccggttcaagatggagtcactctggtttgaaggcctctgattcacctggagacacattccggctgtaccaggcctccaccaggaaagctcccatgataaccacaattacggcagccagacccagtcgtacgaagttacccagggagtagttgctcgatgtggtacctgggggaactgaaagagagaaggggctcagcactgaccctcagagggtatccctccttctcaaatggccccaccaaatctgactatcatcacccacttaatgttttcggttttttggtttttttttttgagacggagttttactcttgttgaccaggctggagtgcagtggtgtaatctcagctcaccacaacctctgcctcccaggttcaagcctccctgcctcagcctcccaagtagctgggattacaggcatgtgccaccatgcccggctaattttatatttttagtagagacggggtttcgccatgttggccaggctggtcttgaactcccgacctcaggtgacccgcccacctcagcctcccaaagtgctgggattacaggtgtgagccaccgcgcccggccacccacttaatgttttctagccagtagtccactgtactttaaagttttaattgaactttttttttttcttgagatcaagttttgctcttgttgcccagactggagtgtaatggcacaatctcagctcactacaacctctgcctcccgggttcaagtgattctcctgtctcagcctcccaagcagctgagattatgagcatgtgccaccacacccggctaattttgtatttttagtagagacggggtttctccatgttggtcaggctggtctcgaactcctgacctcaggtgatccacccgccttggcctcccaaagtgttgggattataggcataaaccaccatgcctggccataattgagctctttaaagttttaatccctgaaaacaaaagatggaatctttgttgttgtttttgagacgacgtctcactctgttgctcaggctggagtgcagcgacgcagtctcggttcactgcaacctccacctcctgggttcaagcgattctcctgcctcagcctcccgaatagctaggattacaggcacctaccaccacacccggctaatttttgtatttttaatagagatgggttttcgccatgttggccaaactggtttcgaactcctggcctcaagtgattcgcctgcctcggcctcccaaggtgctgggattacaggcctgagccaccgcgcccggccaagatatgcaatcctaatgagttgtaatgggagttcctttatcttccttccttgatattcactccaccttagctctcttccttcgtttatttgctctttatcccatttccaccttcccacattgccttttctcctcccgcatccttatgttaaggaatagtcttggggcagcacatgagacggaaggagctctacagagccccgaattccgtggctggatcagcatcctcgcagcacacactgctgtgcagcagtgcacctgagaaagtttgagttgaggccgggcacagtagctcacgcctgtaatcccagcactgtgggaggctaaagtgggaggattgcttgaggccaggagttcgagagcagcctgggcaacatggcgaaaccccatgtctactaaaaatacaaaaaaattagccgggtgtggtggcgggtgcctgtaatcccagctactcaggaggctgaggcaggagaattacttgacctgggcctggggttggggggtggaggctgcagtgagctcagattgtgccactacactccagcttgggcgacagagtgagactccatctcaaagaaaacaaacaaacaaacaaaaccctagcctccagattttcagggaggctgatttgagtaataataaaactctgattggccaggtgcagtggctcatgcctgtaatcccagcactttgggaggcccaagcgggcagatcacgaggtcaggagttcgagaccagcctggccaatatggtaaaaccccatctctactaaaaatacaaaaattagccaggcagggtggcacacatatagtcccagctactcgggaggctgaggcagaagaatcgtttgaacctgggaggcagaggtttcattgagccgagatcgcgccactgcactccagcctgggcaacagagcaagactccgtctcaaacaaacaaacaaacaaaaaaactctggtctcccacttacctggctcaatgtgtattaaactcttttttgcaattcctctgtcttgatgaatgggcttcatccaggcacccggcaagagctgtaatgtaactcattacagcagttacaacagatgaaaaataatttacagagctgaggaagcagagtgctagcacccagtaaggcaggaaacaagatactttcagaagaattctagcagtcaataaaagacatgggtagacttcgcatccacggcatagaagcaggaggctgtgcaaacaccatgttctgaggatgagataattttttttttaaatttgaaactgggtctcactatgttgcccaggctggtctcaaactcctgggctcaagcaattctccagcctcagcctcccaaagtgctgggattacaggcctgagccaccacacatgactgagaaagaattattgagagtgaaatcactaacaccaagaaaaaacaaaacacgccatgcacagtggttcacacctgcaatcccagccctttgggaggccgaggtgagcggatcacctgaggccaggggttcaagaccagcctggtcaacatggtcagaaccccatctctactaaaaatacaaaaattagccaggcgtggtggcgggcacatgtaatcccagctactcaagtggctgaggcaggagaattgcttaaactcgggaggcagaggttgcagtgagctgagatcgcaccactgcactccaccctgggcaacagagcgagactctgtctcaaaaacaaaatgaaacaaaacaaaacaaaaaaccaaaacgctaagagatgcaaagactggtagaaggaatctggtgctggtagattcataattttcaaaaacagcctagaaattttccaaggatgtagtataacaaaaaggcaaaggagggccgggcacggtggctcacacctgtaatcccagcactttgggaggccgaggcaggcagatcacctgaggtcaggagttcaagaccagcctggtcaacacggtgaaaccttcatcgctactaaaaatagaaaaattagccggatgggtggtgcaggcctgtaatcctagctacctgggaggctgaggcaggagaatcacttgaacctggaaggtggaggttgcagtgagcgaagatcgcgccattgcactccatcctggcaacagagtgagactccatttcaaaaaaaaaaaaaaaaaaaaaaaaggcaaaggagtggaaattgtgaaagggaggtttttttgttgttttgttgtttttgtttttgttttttgttttttgtttttgagacagagtctcactctattgcccaggctggagtgcagtggcaagatcttggctcactgcaacctccgcctcccatgttcaagcaattctcctgcctcagcctcccaagtagctgggtctacaggtgcatgccatcatacctggctaattttttatttttagtagagacggggtttcactatgttggccaggctggtctcaaatccttgacctcagatgatccatccacctcggcctcccaaagtgctgggatgacaggcatgagccaccacgccaggccagaaagggaagattttgttaagagcgatgatattgtaagtaatgaagaaatgagattcacagaagaacaaaacaatctctgattaaaaacaacacacacagttcctcaaaaccatacacgcccttacctgtcaccaatatctcaagctgatcactgggttctgaggcccagaagggagactttgtctggtagtacatgcagctgtagttcccagcatcgccggctgtcacgtccaccagagagaagtctatctccttccccgctggactctgcagctggatgggtgatggcgtccctgccttcagtagagcgaacatgataggcacaaacaattggtctcgcttctggcactgcagagtcacccttccacctgcggtcactgtacccctttggtaggttcggaggaaaggtttagataaatgtcctgtaagagaagtcaggttctgaggtcctggggagaagtctggaatcccccactcacccctgttctcctggccggaggctctcgtggagtgtgggaaatgagagattcctgatctcttctaccttcctccacttcctactccgaccccaggacagagattctccctcctacaagacctgtgtaaggcctggcatggtggctcacacctgtaatcccagcactttgggaggccaaggcgggtggatcacctgaggtcaggagttcgagaccagcctgcccaacatggcgaaaccctgtctctactaaaaatacaaaaattagccgggcatggtggcaggcacctgtaatcccagctgctcaggaggctggagcaggagaatcacttgagcccaggaggcggaagttgcagtgagccgagatggcaccactgcactctggcctgggcgacaaagtataaaaccaacatatgcaatttcgttcctgtctctctccctctcccaccacccccaactactctgaaggtgggaccccttttctccctctgttcctccacttcctccctcatcccctgtcccccgtatgtcattggcaggcaccctgtctgtacctgtcaccaacagtagaaggacgtcactgtgctgtgaaaggatgtggggggatgcttttctgtagtattcacaggtgtactctccagcatttctgacttttagattattgaggtgaaattcggccgcgccctctgtagaatcaaggggcttcggggactccagaataattcctcccttcctgagaacaaagctcacacctctggcaggagtccaacatcgcagcgtcacattgctgttggcagggaccaccgagctgggccaggcactgagggacggcttgggcagtgaccctggaaggaagcagagcctgatgctggacccgatgccctcccctgctctcaggaagccctttttaaaatttattattattattattattttgagatggagtctccctctgttgcccaggctagagtgcagtggtgcaatctcagttcactgcaacctccgtctcctgggttaaagcaattctcctgcctcagcctcccaagtaggtgggattacaggcacgcaccaccacacccagctaattttgtattttagtagagacaaggtttcaccatgttggccaggctggtctcgaactcctgacctcaggtgatccacccaccttggcctcccaaagtgctgggattacaggcgtgaacccctgagcccaatcaggaatcccattttaagaagggaagcgggctgggtgcggtggctcacgcctgtaatcccagcaccttgggaggccaaggcaggcagatcacgaggtcatgagatcgagaccatcctggccaacatggtgaaactccgtctctactaaaaatacaaaaattagctgggcgtggtggcaagcacccgtagtcccagctacttgggaggctgagacaggagaatcacttgagcccaggaggcggaggttgctgtaagccgagattgcaccaccgcactccagcctggcgaaagagtgagactccgtcaaaaaaaaaagagaaaaagagggggaaggggaagagaacagcaggggatttgggatgacaggccaaggagggtgtagttgaagaaacactcaccatctccccttgtgtctccttggcccacgcacagtcctgcaagacaatcctccgtgagccagaagcccctacctggagccacgtcaccccctgccctgacccctggagatcgtcccagagtctcctgctgagaacagacccttagaggtcatacgctcaggagttctcattctccccacactggactgtggcttctgctcgacttccagctcctccatcctttcccagagattctccttgaccatcctgtgtggctgtcacctccccctgctccaggcctttcccacaaatccttccattctcatcttctgtttgaaaacagcactcattcttaccatttctttctttctttctttttctttcctttctttctttcttttttctttctttcattcattctttctttcattcattccagagacagagtctcgctctttctttctttttctttctttctttctttctttcattcattctttctttctttcattcattccagagacagagttgcgctctgtcgcccaggctggagtagagtgacgcaatctcggctcactgcaacctccgcctcccgggttcaagtgattctcctgcctcagcctcccaaatagctgggatcacaggcatgcgccaggacgcccggctgagttttgtattattagtagagacagggtttcaccatattggccaggctggtctcgaactcctgacctcaggtgatccacccacctcggcctcccaaagtgccgggattacaggcatgagctttgtgcccagcttctttttattttttaatttttcattttattattgtgttttgagacagggtctctctctgttgcccaggttggagtgcagtggctccatcatggctcactgtagcctcccaggctcaagtgatcctcccacctcagcctcccgagtagctgggatcacaggtgtgcaccaccacacccggctaattttttagtctttcccagagacagagtctccctatgttgcccaggctcatgatctcttttaatcccttcatgactccaaacaggacaaaatttattgtttggtgtcctgtaacaagcctcaaaacatccaaatggtcattccagaaaggggaaagcatacgttcctccctgtttcacacatggctgcatttgctcttcctcctttttaattttttttgatagagacagggctgggctggttaagaactcttgaccatgccgggcgcggtggctcccgcctgtaatcccagcactttgggaggccgaggcaggtggatcacgaggtcaggagttgaagaccagcctggccaacatggtgaaaccccgtctctactaaaaatacaaaaattagccaggtgtggtgatgggcgcctgtgatcccagctactcaggaggctgaggcagagaatcgcttgaacccaggaggcagagtttgcaatgagctgagatcgcaccactgcactccagcctggccacagcgcgagactcagtttcaggaaagaaaaaaaaaagagaaagaaaagaaaaaacataatatcaagcctgtttatgaacattatcataataatgagattgatctaactcaaagaaagttagttaggcctgtgtctctgagagatttcctctttttcccctgtgtgaacagttttaggtctcagcaggaaaaaggagaagttaccaggcgtttgtgctactattacatccatgagccaatccataaactgacacttcaagttttgcaaaaggaaattgtgaacacccaaaatgttcaaacaacgtaagtgtccatccatggaagaatggataaacacagtgtgctctatatattcaatgggatttttcttctttttcttcgttttttttttttttttttttgagacatagtttcattcttgttgcccaggctggagtgcaatggcgcgatctcggctcactgcaacctccgcctcgcgggttcaagtgattctcctgcctcagcctcccaagtagctgggattacagctcactgcaacctccgccttgcaggttcaagtgattctcctgcctcagcctcccaagtagctgggattacagctcactgcaacctccgccttgtgggttcaagtgattctcctgcctcagcctcccaagtagctgggattacaggcatgcaccaccatgcccagctaattttgtattttttagtagagacagggtttcaccatgttggtcaggctggtcttgaactccccacctcaggtgatccgcccatcttagcctccaaaatgcttttttctttttcttttctttctttctttttttttttttttttttttttttgaggcagggtctcgctctgctgcccaggctggagtgcaatgatgtgatcctagttcattccagcatcaactccctgggctcaggtgatcctcccacctctgcctcccgagtagctgggactacagctgcacaccaccatgcccagctcatttttgttgttgttgttgtttttaatatttatttatttattttgagatggagtttcgctcttgttgcccagactggagtgcaatggcatgatctcggctcactgcaacctctgactcctgggttcaagcgattctcttgcctcagcctcccaagtagctgggattacaggcgcccgccaccacgcatggctaatttttatatttttagtagaaatggggtttcaccctattggccaggctgttctcgaactccttacgtcaggtcattgcaaaaaaagtgctgggattacaggcgtgagccaccatgcccagcctcatttttgtattttttgtagagacagggtttcaccatgttgcccaggctagtctcgaactcctgggctcaagcgatctgcctgcctcagactctcaaagtgctgggattacaggtgtgagacactgtgctcggcctacagtgggattttagccataaaaaggaaaggaaatctgacatatcctacaatatagatgtagctcgaggatattatgctgagtaaactaagtcaggcaaaaaagaacaagtgttatgattccactcatacatcctagaataagcaaattcatagagataaaaattagaatgggctggacacggtggctcacgcctgtaatcccagcactttgggaggccgagacaggcagatcacaaagtcaggagatcgagaccagcctggtcaacatggtgaaaccttgtctctactaaaaaaaaaaaaaaaaaaaaacttagccaggcatggtggtgagcgccagtgatcccagctactcgggagggagaggcaggagaatcgcttgaacccaggaggcggaggttgcagtgagctgagattaggccactgtactccagcctgggtgacgaagcaagactccatctccgaaaaaaaaaaaaaaaaaagaaattagaatggaggttaccaggggctgggaggaccgcggcaaatacagagttattggttagagggtgtagcgttcatattgggaattgtgattgttaatttgatttatcagctagaccaggccacaggatgctgggatatctggttaaacattatttctgggcgtgtctgtgagggtgtttttagaaagatcagcatttgaatctaatgctgagtcgggcaggttggccttcctaatggaggtgggtattctgctgagggccaggatgggagaaaaaggtggcagagccaccacagtggctcacgcctgtaatcccagcactttgggaggccaaggcagaagggctgcttgaggccaggagtttgagaccagcctgagtaacatagtgagatcccgtctctacaaaaaatttaaaaattacacggggcactgtggctcacgcctgtaatcccagcactttgggaggctgaggctgaggcgggcagatcacctgaggtgatcacctgagggagctcaagaccagcctggccaacatgatgaaaccccgtctctactaaaaagtacaaaaaatcagccgggtgtgtggtgggcacctgtaatctcagctacccaggaggctgaggcaggagaattgcttgagcccaggaggtggaggctgcagtgagctgtggtcataccactgcactccagcctgggtacagagtgagactttgtctcaaaaaaaggaaaaggagggaaggaaggaaggaaggaaggaaggaagggaaagagagagaggaaggaaggaatgaaggagaaagagaaagaaaggaaggaaggaaggaaggaaggaaggaaggaaggaaggaaggaagaaagcaagcaagcaagcaagcaagcaagcaagcaagcaagcaagcaagcaagcaggcaagcaagcgggggctcacgcctgtaatcccagcactttgggaggccgaggcgggcagatcaagaagtcaggagatggagaccatcctggctaacacagtgaaacctacgaaaaaagccgggcatggtggcgggcgcctgtagtcccagctactcgggaggctgaggcaggagaatggcgtgaacccgggaggcggagcttgcagtgagcagagatcgcaccactgcactccagcctgggcgacagagcgagactccatctcaaaaaaaaaaaaaagaaagagagagagaggaaggaagggaggaaggaaggaaggaaggaaggaaggaaggaaggaaggaaggaagggaaggagaaaaagaaagaaaggaaggaaggaaggaagaaagaaagaggttttagtgtagatagtggtgatggttacacagcggcctcaatttactttatagttatctatttgacactaaatttttatttatggtattaaggtttctgggccaggcacagtggctcacatctgtaatcccagcactttgagagactgaggtgggcagatcacctgaggtcgggagttcgagaccagcctggccaacatggtgaaacaccgtctctactaaaaatacaaaaattaaccaggcatggtggcgcacccctgtaatccagttactcaggaggctgaagcaggagaatcgcttgaacccgggaggcagaggttgtggtgagccgagatcacgccattgcactacagcctgggcaacaagagcaaaaccctgtctcaaaaaaataaaataaaataaaataaaataaggtttctattctgaatacttttacttacacacaaaaagtcagagttgatcctgagaaaaggggtaagccaatgaagccaggtggtggaggcattcagcaaaactcacgaagttgaaactacaggagttgaagtttgcagagcactcgtttccagggaatgtctgcagtgcactcagcaggacgtctcactcctcccgtgtgctcagtaagccaaagttgatgttattatttccatccccagcccaactatcccaccagttccatgattttctgcagtcccagtggatagccctgtgagacttactgaaacagaggagggaaagcagcttagggatcatgatggctccttagccctcccagagtccgtcttgggttctgcagtccacagatgggagaagagctggagtcgtcgctgcctctctcccaccccagagtgtgggcagtaacagcctttcctagcctttcagtttcccctcccatatccacattcaggaaacatgttgatgttgctgattgcaacatgctccttacacacaccagtgttcgagcacttgactcacaggaaatgctcctctgtctcaggcagatttcaggcatcaaacaggtaaccccgaaaatgcttcagacttggccctgaagggttcgtattgaagagatgaaagcacttcactcttttttttttttttgagatggtgtctggttctgttacctgggctggagtccagtggcacgatctcaggtcattgcaacttcagcctcctgggttcaagcaattctccggcctcagcctcccaagtagctgggattataggcgcatgccaccatgcccggctaatgtttgtatttttagttaagatgaggtttcacaagttagctgggctagtcttgaactcctcgcctcaagtgatccacctgcctcggcctcccaaactgctgggattacaggcatgagccactgtgccaggccttcatcaccattttttttttcttttgagacagagttccactctttcgcccaggctggagtgaagtggcaaaatctcatctcattgcaacctccaacccccaggttcaagcggttctcctgcctcagcctcccaagtagctgggattacaggagcccttcaacacgcccagttaatttttgtattttttagtagagatgaggtttcaccatgttggccaggctggtctcaaactcctgatctcaagtgatccacccacctcagcctcccaaagtgctgggattacaggcatgagccactgtgcccagccagtcatgagctcattttttaagttcagaatatttcagtacatatctatctttatcaaataagaaccattttaaaaataatataagcaccacagcactgtcacatcaagaaagttaagagtacctccttgataccagctaatacccattcagtactcaaatttccctgattgtctcaaaaatgtcatttctatcaggtttttaaagaataaatcaggatccaataaaagtctacagattgcatttgataattatgttaatttagcctggcgcagtggctcatgcctgtaatcccaacactttgggagaccggggcaggtagataacctgaggtcaggagttcgagaccagcctggccaaccatggtgaaacctcatctctactaaaaatacaaaaattagctgggcgtggtggtgcacgcctgtaatcccagctactcaggaggctgaggcaggagaactgcttgaacctgggaggcaaaggttgcagtgagctgagatcgcaccattgcactccagcctgggcaacagagtgagactcagtctcaaaaaaaaaaaaaaatgttaatttgaatcagacaaaattttttatttttttgttaaaataagaaatcaagcaagttagtttttaaccatgttttttttcatcttgcatttggaagaagagcaaaatgccccgaagtctcgtttttgttttcggattttttgtcttgatagcacctactcttcttactgttttggaacatagaaaagtcaacaaggcaacaaattataaggagtaaaaccaactataattacaggtgtttctttgaaagttattttcacaagatgtggcaatgatttttaaaggcttgggactcttacaagacccttttgttcaaataacagttttgtgtatgaatttatttcaacagagaacaatttagtaatgtttgtgaatattcatttagttctccatattgtaccagaaaacaagactgatattcttgtgaatcttctcaattcaactctttatcaaatcagattccttaaattagtgttgtgactcagaaaaaatctttctccttatgcagtatcagggaaaagaggacatctcctatatttcttcttaacatctctgttgctaacaaggaatatgcatattttaaaactaggctctggaattttatcagtcaacaggaaaggcctggtaaagttccattccacttggaaatgaagaaaggagaccctgattcaaaaaacgaaaaaagaaagaataaagaatagcttagggccaggcaaggtggatcacacctgtaatcctaagattttgggaggtgaggtaggtggaaggcttgatcccaggagttcaacaccagcctgggcaacatggcctaatcccatctctacaaaaaatacaaaaattagccaggcttggtggtatatacctgtaatcccagcttctcaggaggctgaggtgggagaatcacttgaacctgggagggggaggtggcagtgagctgagatcgcaccattgtaccccagcctgggcaacaagagtgaaactccatctcaaaaaataataataaaataaataaataaataatcattcactttgttaggtgtttatcacacctaaccttaagaatatgttaccaaaataaaaagtcttatagatgaaatcatattatatctgaggtttactttaaaatactccaggagaaaatttaaaatagacttgggggaggggacttatctgtagttatctgcacataatctacatgattatctcaaagccatccttttgctgttgagaattctgatttttagctgggcccattggcacccaggtaaaaaactacattcttcagtgtcacttacaggtagatgtagccgtaagtcttcatctaggacaatgataaataagcataaatattgtagacagcttccaaaaggttctttaatgaagtacactttccttccttcacttaactgcctaaaatgtggatgtgatgactggtattctagcgtcatcttgaaccatgaagatgagatgaggttcaagatggtggagggtgagccagaagtaacttaggtccataatgctttttggagtcactgtgccagccttggactgctcccttcagatttattctacataagggagaaatcaattggtattagttttaagtcatcattatttagttctcttttgggtttaggttatcaattactgtgttaacaaaccaccccaaaactgagtaacttagagtaacaatcttgtttttttttttttttaatcattcctgatctggtgagatgactgggctcagttgagcggttcttcggttcaatgtgatgtcttcctgggcttcagtcatcagggtggctcaactgagctggaatctccaagatggcacttgcaaatggctggctgttgatgctggatgttggttgaaagctcggctaggactgttgaatgatgtacctgcacatggcctctccatttgattcagacttcttggaggatagcatctgggtttcaagaggggatgtcacaagagagctttctaaaatagagaaggcggctgggcatggtggctcacgtctgtaatcccagcactttgggaggccgaggtgggtggatcacctgaggtcaggagttcaacatcagcctggccaacatggtaaaaccccgtctctactaaaaacaaaattaaaaaaaattagccgggtgtgtttgtgcacacctgtaatcccagctactcaggaggccgaggcaggagaattgcttgaacctgggaggcggaagttgcagtgagccgagatcacaccactgcactccagcctgggcaacagaatgagactctgtctcaaataaataaataaataaataaaataaagaaggcaaaagttgtttgtccctttaaagactaagcctggaactgacacagtttctcttcttctacagtcttaaggaaaggccagattcaaggggagggaaaataaactctacctctctatagggacagtgacaaagaattggaggccatctttagtctgtcatgtgttatggtcaatggaaatagatatatatatatttactgagtgcctgagtcccaccgagagattttaattatttttttatttttgtttttttaagatggaattttgctcttgttgcccaggctgaagtgcaatggcatgatctcagctcactgcaacctctgcctcccgggttcaagcgattctcctgcctcagcctcccaagtagctcggattacaggcaagtgccaccacacccagttaattttgtattttttagtagagatgggatttctccatgttggtcaggctggtcttgaactcttgacctcaggtgatctgcccaccttggcctcccaaagtgctgggattacaggtgtgagccaccgtgcccagtcgagattttaatttttataatgggtataggatgaggcctgggtgtctcattctgtgttttaaatgttcctgggaaattctaatgtgcagtcaagtttgagaaccactgggttggaacacataacctccttcccatctcagaccctgaaacatcctgaaaactcctgtatctggagtttttcccccatttttgcttggctaactttgactcttccctcagaaaccagcttcagaatcttttctttagcaaagacttccctgcaagttctttaacagcacttatctcagctgtgacaaaatcatcaatggtgtaattgtgtctttttaatgtcttttcccctattcttcataatcgtcaaagtaaaggatagctcttctctcagtcagaactattaatagatgctgtaatggaaatgaaacaagactctcagactcttgttaaagtaagaagtctagcagagtctcaggctttaattttttttttccgatcataaatgtgggagaaagatcatttaacctgctgctaaggtttgaatatttgttcccttgaaaactcatgttgaaccagcctgggcaacatagggagaccctgtctctacaaataatttaaaaattagccaggtgaggtggcacatgcctgtgatcccagctactcaggaggctgaagtgggaggatcacctgagcccagaaagctgaggatgcagtgaaccgtgattgcaccactgcactccagcctgtgcaacacagtgagaccctgtctcaaaaaataaataggtaaataagctgagtgtggtggctcacacctgtaatctcagcactttaggaagccaaggtgggcagatcacatgaggtcaggagtttgagactagctggccaacatgatgaaaccctgtctctactaaaaatacaaaaattacccgggcatggtggcacgtgcctgtaataccagctactcaggaggctgaggcaggagaatcacttgaacctgggaggtggaggttataatgagctgagatcatgccactgctgtccagcctgggtgacatagcaagacattgtctcaaaaaatacataaataaataataaataaacttatggtgaaactgaatccctaatgtggccgtattgataggtcgggcatttaagaggtgattgggtcatgaggactcttttctcatgaatgaactaatccattcatggattaatgattaatggattagtgagttaatggattaatgggttaccctgggagtgagactggtggctttatcagaagaggaagagagacttaagtagcacgctcagctcttttgccctgtgatgccctgtgccacctcggaaccctccagagagtccccaacagcaagaaggtcctcaccagatgcagcccctccaccttggactttccaacctccattaactacaggaaataaattccttttctttataagttatctggtttcaagtgttctgttctaagcaacagaatacagactaagacacagacaccaatgcatagcttctgatttaacagaattgtttttacaagcatttattctgcttggaaattcagatgtcaatcataagattgttaccagggcaacaaaatattaagtaagaccaccaaatggcaccaaggtttctccttcaaaataatgattgcaatactggcaataatttctaatgtctttggactcctacaagattattttgtgcaaattacacttcaaagcacagatttatggaaccacagaatggaacactggctgctgtaataaatatccatagatctccatactacataagactataaaacacatttagagcctttttaatattctcagtttattaacttatcaatccacattccgtttttttgtttgtttgttttgttttgtttttttactttaagttctagggtacatgtgcataatgtacaggtttgatacatgtgccatgttggtttgctccacccatcaagttatcatttacattaggtatttctcctaatgctatccctcccccagccccccaccccactctgtttttttttttgtttttttttttttaagacagggtctcactgtgtcacccaggttggagtgcagtggtgtgatctcgactcactgcaacctctgcctctcgggttcaagtgattctcttgccccagccctcccaagtacaaggaattacagggttgtgccaccacgctgggctaatttttgtacttttagtagagacagtgttttgccatgttggccagggctggtctcgaacttctgggcccaagtgatccgcctgcctcgacctcccaaagttctgggattacaggtgtgaaccaccatgcctcgcctaaactacattcttgaattagttttatggcacagaatatctttttctcctctctcaatgccctctctctctctagctccctctcctcccctacagctgcaaagaagagatcttcttaatccatttcttaaacttcttttgatcaattataaagaattttttttttagatggagtctcactctgtcacccaggatggagtacaatggcacaatctcagctcactgcaacctctgcctcccgggttcaagtgattctcctgcctcagcctcccaagtagctgggactacaggcatgtgccactatgcccagctactttttttttttttttttttgtatttttagtagagacggggtttcaccatgttagccaggatggtcttgatctcctgacctcatgatccgcccacctcagccttccaaagtgctgggactacaggcgtgtgccactacacccggctacttttttttttgtgtgtgtgtgtgtttagtagagatggagtttcaccatgttagccaagatggtctcgatctcctgaccttgtgatccgcccgcctcagcctcccaaagtgctgggattacaggtgtaagccactgtgcccggccaattataaatattttttaaggctaaactctggaattttgctagttagccttaaaagcacaaagcaggcctataaagttcaattttactggtagaaagcaagaaatggatgaataggatgttcgctgacaaccatgcaattgaaacctcctttgcaaaaattacgagagtgagcaaaggatggcagtgaaggagatcggatctggccagcccctaccttgcctttggccctcaaactgcctgtagttattcctgggtttaggctaatctgacttgtctctttgggagacatttattttattttcttttatatttccttgagacggagtctcgctctgtagcccgggctggagtgcagtggtgagatctcggttcaccgcaacctctgcatcctagttcaagggattctcctgcctcagcctccagagtagctggaattacaggtgcctgccaccatgcccgactaatttttgtatttttagtagagacggggtttcaccatgttggccaggctggtctgaaactcctgacctcaagtgatccgcccgccttggcctcccaaagtgctgggattagaggaaagaaggaaaggaaggaaaagaaaggaaaagagaggagaggagaggggaggggaggggaagggagagaaaggaaaggaaagggagagaaagggaagagagaaagaaagaagaaaagagagaaagaaagaaagaaagaaaagaaaaagaaagaaagaaaaagaaagaaagaagaaaaaagaaaagagaaaaggaaggagggagggagggaggcaaggaaggaaggaagcaagaaagagagaaagagaaaagaggctccttataaacaacaaaagacacccttctcaccaagggtttttggaaattccagagtgatggggtgagaagggtgtctttggaaccaaagctgaagaccaagtacatatttcttactatatcacggtatcacgggaggtaaaacggaggtgtccttgaagcagctcctccccagcccccaatcctcttgtgtgcccggaggatcagaagaggtcccgccgagactcagcttagctgtggttcaagcctctgattgcgtggataagtaccaggtttccagagtgccagggcggggctgccccttgcggtggcattaactttccatggctatttaaaatcagcagaggacacacgatcttcagatgggtcctgttttacttccatattttctcctagagagaagaaaaatcattaaacttttttttgtttgttttttgtttttttgttttattcgttgtttttcttttttttgggacggagtctcgctctgtggcccaggctggagtgcaatggcgtgtatcagctcactgcaacctctgcctccagggttcaagtgattctcctgcctcagcctcccgagtagctgggattacagctttgtatttttagtagagtcggggtttcactatattggccagggtggtctccaactcctgacctcaggtgatctgcctgccttggcctcccaaagtgctgggattacaggcgtgaaccaccgcacctggcctactgtattttttttttttttgaatagagaagggagtctcaaactcttggcctcaagccatcctcctgcctcagcttcccaaaatgctgggattacgagtgagccactgcacctatcccaccccctcccaccctcatttttagaagggcacaggctagagaccatatttccatcagtcacttttgcggctagacctggccatgagactaagttctagccaatgggatgcgataggaagatatatgctcaaattctaggtcctgctcttaaaaaataattgtgtgggccgggcgcagtggctcacgcctgtaattccagtactttgggaggctgaggcaggcggatcacgaggtcaggaaatcgagaccatcctggataacacggtgaaaccccgtctctactaaaaatacaaaaaaaattagccgggtgtggtggtggacgcctgtagtcccagctactcgggaggctgaggcaggagaatggcgtgaacccgggaggcggagcttgcagtgagccgagatcgcgccactgcactccagcctgggcgacagagcaagactccaactcggaaaaaaaaaataataataattgtgtgagcccttttctctctgtcctctccactttcttggggctcagaaccagaaattaaagctacatgttgataaaagcaaaaccatcccaccttaacaagtaaatcgttgagattgcccagtgatttactgttaagtgagagagaggtacatttatatctagtttttttccggtggtgaaggagattctttttttctctctctctctcttttttatgagatggagcttggctcttgttgcccaggctggagtgcaatggcacgacctcggctcagtgaaacctccgcctcccgggttcaagtgattctcctgcctcagcctcccgagtagctgggattacaggcatgcaccaccacaccaggctaattttttgtatttagtagagacagggtttcaccatgttaatcaggctgctctcgaactcctgacctcaggtgatccacctgccttggcctcccaaagtgctaggattacaggtgtgcgccactgcacctggccgggagattcttttttacaacagcttaaagtgctctgtaaccaatacactatgcagtgatttggttaatactttgtgagttccatgagtgcagggtttacgtctgctattgctccccactggaccgccggactctagcacaatgccatgcacggtagacattgaatacatgagtgatacgaggatgaatgagactaggggaaatcagtggaagccctaggcctggcgcagtgactcactcctggaatcccagcactttgggaggccaaggaaggaggatggcttgaggccaggcattcaagaccagcctggacaacatggtgagaccccatagctataaaaagtaaacaattagccgggcgcggtggctcacgcctgtaattccagcactttgggaggccgaggcgggtggatcacgaggtcaatagatcgagaccatcctggccaacatggtgaaaccccatctctactaaaaatacaaaagttagctgggcgtggtggtggcacacgcctgtaatcccagctactcgggaggccgaggcaggagaatcgcttgaacccaggaggcggaggttgcagtgagccgagatcgcgtcattgcactacagcctggcaacagagcgagactccatctcaaaaaaaaataataataataatagtaataataaattggccaggcgtggtgatggcagtgttgtcattgctttaagaggcaggaacagggggaaaagacccagcagtctaaccacacagacaagtcccaagttaagcacttctgtgtgacttgggggctgttgataaagatcagaaataacctatgtggatcacccagcaaaatgaccagtatgaaaagatgttcagtggtagaaaatgaaataagcattgtgactacaactcactcaataagcattcattgaacactggtcactggtaaactgctatgaagaaatctcagctgggtgcagtggctcacgcttgtaatcccagcactttaaagggagaccaaggtgggcagatggatcactttaggtcaagcgttcgagaacagcctggccaacatggtgaaaccccatctctactaaaaacacaaaattagccgggcatggtggcaggtgcctgtaatcccagctacttgggaggctgaggcaggagaatcgtttgaacccgggaggtggagattgtagtgagctgagatcacaacactgcactccaacctgggaaacagagcaagactccatctcaaaaagaaaaaaaatctcaagcttattggatagataaatgcacaggtagatagatggatattgaatgaataaatagttcagtggattaaaaactggttaatgaagaaatggatgggtaaatggatggaaatatgaatgaatgcatgatggataaggacaaatgaaatagacaaatgtacaaatgaaagcaaaggaaaaagagatgctcaatagaaatgaataaggatgagaatcaatgctagacatgaatgagtgaatggtgaatgaaggagtgattgaatggatgaatacatggagttaagttgaagtacaaactcggccaagacttctttttctctgctttgggtggaaatacattttaaaaaaaagagggccgggcacggtggctcatgcctgtaatcccagcactttgggaggctgaggcgggcggatcacctgagtttgggagttcgaggccagcctgacctacacagagaaaccctgtttctactcaaaatacaaaattagccaggtgtggtggctcacacctgtaatcccagctactcgggaggctgaggcaggagaatcacttgaacctgggaggcggaggttgtggtgagccgagatggcgccattgcactccagcctgggcaacaagagcgaaagtccacctcaaaaaaaataaaataaaataaaataaaataaaaaaagagggaaaaaggaaaaaaaaagactccctgatgtgccactgacttcctgtacatgtttaggtaaacttaatatcacctctctttccaccattttcccatttataaagtgggaagactggatttgatgacatcacagcctcatccaggtctggtgccttccttataacctgcgtctcttctttattcttttttttttttttttttttttgagacggagttttgctctgtcacccaggctggagtgtgcagtgatgcaatctcggctcactacaacctccgcctcctgggttcaagcaattctcctgcctcagcctcccgagtagctgggattacaggcgcccgccaccatgcccggctaatttttgtatttttagtagagacggggttttaccatgttgtccaggctggtctcgaacttctgacttcgtgatccacctgcctcagcctcccaaagtgctaggatcacaggtgtgagccagcacccccggcttattccttttttaaaattgttattatttcccacagccacatatgccggggaggttgtcccacatatgttctaccaaggcccctctggcactgagatcaaaccccggaagacccgctcagtctctcctcccgtcttttcaacacgttagcgcccccaggtggctaattagacttcaaaattcagttcttgaggcgggcggatcacttgaggtcaggagttcaagaccagtctggtcaacatggtgaaaccccgtctctactaaaaatacaaacattagccggacatggtggtacgcacctgtaatcccagctattcgggaggccgaggcaggtggatcacttgaggtcaggagttcgagaccaccctggccaatttggcaaaactccatctctactaaaaatacaaaaattagctgggcgtgatggcgcacacctgtaatcccagctactcaggagactgaggcacgagaatcacttgaacccgggaggcggatgttgcagtgaaccgagatcacgccactgcactccagcctgggtggagtgagatcttctctcaaaaaaaagaaagaaagaaagaaagaaaaagtcgtgcttgattatgcttgatggcaaaaaggtgagaccttcctttcggcactgagtctggtagaaatcggtgttacagggtagctaacatttattgaacacttactacgggccagttactgctttaaatgttttatgtgtattacccactgactcctacaacaatcctatgaagtgggttttatcagtgcatccattttaccgtcaaggcaagagagagttggggaagggcgctttctgaatgctgctaccgtgtccagagttggttccttcctgtgggtttgtggtctcgctgactttaagaatggagccagggaccttcgtggtgagtgttacagcgcttaaagatggcacggacctaaagagttagcagcagcaagatttattgtgtagagcaagagaacaaagctcccacaacgtggaagcagactctggtggggtgccgcgctcgccagcttttattcccttattgtccccgcccgtgtcctgctgattggtccattttacagagcgctgattggtccatcttacagagtgctgattggtccattttacaatcctcttgtaagacagaaaagttctccaggtccccattcaacccaggaagtccagctggcttcacgtctcactactacctttctgtagctgctactactacagtgagtagacggcagtgctgggattcgaaccctctgtcttctggcttggaagtcttaaccactaatcgcgtcttcctttcagctactccttgggaaaggcctggaaagaagctacagcacagggcacagcggggtctaaggaccgttccgcggagctcagccagcaggactgtggggctgcaggaaaggacagtccagcccagggtcccagcttctccgccactcaggttggaagtctcgggctgcagtgctcctggggctcaggggcggataccagcaggagcgcggttctgactgcgccagtcaaaagtgaccagcgcgcccagggagatgaggaccagcccggccagccccaggcggactaggttcccccgggtgtagtcggaggagccagagtctgcgggcggagccgggagagaggggccatcagctcccggaccccaaagtctgggccctgaactccaggtttccagcccctggggtggacttagggacctgactctacagtctcaaagttgagggggagtcgatggaggcttcaactcctgggtccaggaagaaggggctggggcctggactgctggatcaggaaggaggggctgggggcctggagtcctgggtccaggaaggaggggctgggggcctggagtcctgggtctgagggaggaggtactggggcccgggaatcctgggtctgagggaggaggagctggaggactagactcctggatctgagggaggaggggctgggtcccaggaatcctgggtctgagggaggaggggctgcaggactagacccctgggtctgaaggaggagaggctgggggcctgggctcctgggtctgagggcggaggtcctggggcctgcattcctggggcggaggaggcgggccgggcctcagggccctcaccttcccagctgatgaccagcacctcgctgcgctgcgacagcacgtagggcgcggagggcgtgtgatagtagcagctgtaggtgccgggggcgcgggcgcccagcagcgtgaagtcggcccagggctgcgcggagtggcggtactgcagcggggccgccacgccctcgcggtacagcacgaagctcatgttccgcaggcggcccgcgcagcgcaggctcacgttggcgccaggacccaccaccggcccgggcagcgccaccagcgacggccgcggcagctcctctgcagagacggggtgagagtccggggccgcgtgagcgtcttccgctcgctcgctcgctctgtttctccttctcctctgtctctcgctttctctgtgcctctctctctctttctgcctctctttctctctgcctgtctctctctctgtctgcctctctctctgcctccctctctctctgcctccctctctctgcctccctctctctctgcctccctctctctctgcctccctctctctctgcctccctctctctctgcctccctctctctctgcctccctctctctctgcctgcctctctctctgcctgcctctctctctgcctccctctctctgcctccctctctctctgcctccctctctctctgcctccctctctctctgcctccctctctctctgcctccctctctctctgcctgcctctctctctgcctccctctctctctgcctccctctctctctgcctccctctctctctgcctccctttctccttctgcctctttctctctctctccccccgcactgtacctctctctctctctgctcccctgtctctctctctccccctagtgtctctgtatctgtcttttcttgtgtctgtgaatctgtttgcccgcctcgctctgtctctctttccctatatctctctgtccctcccccaactcccttgttccacccacttctcctccccgaccccaggacctcacctgtcaccagcagctccaggacatcgctgggctgggaccagacacccggcccccagtctggccttcggtagcagcagcggtaacttcccccttgggctggagtcacctcctccagaaagaattctgccagctcggaggacacatcccggaagagaaggggagcgatctctccaggcttgaaaagtccaaatctccaagcgggttggggtgcccggcatctcaaggtcacgttgaccccaggggtcacaactgtagccggctgagctcccagccatggcttagggtggtatgaagctggggggactgaataaacggggctgcctgggtcctcgggcctcctgggagccccagaagatgaaagggaagttggggaaggaggaaaatcaccttggacaattactgcccctttcttagcctcagtttcctgtttgtaaaatcagggagagactggactacaatcaagccttgttaaaaccaggtgcaaatcagaggggcaggacagaaacttctgagctttactccacagtttgtaaacacagtttcaaaaggtcaggtcccagaactctgtaattttattattattattatttttaagtaatgagatgggagggggcggtctccctatgttgagcaggttggtcttaaactactggcctcaagcaatcctcccacctcggcctcccaaagtgctaagtttacaagcttgtgccaccacacccagacttttttttttttttttttttttttttttgaggcagggtcttgctctgttgctcaggcaggagtgcagtggcatgttctcaactcactgcagcctcaatctcttgggctcaaacagtcctccacctcagcctcctgagtacctgggaccacaggcacatgccactacaccaggctaatttttttttttttaatttttagtagagacgagcattcgctatattgcccaggctactcttgaactcttgggctcaagcaatcctcccacctcggcctcccaaagtgctgggattacaggtgtgagccaccacgcccagccagaactctaattttaaatagctttccagaatatttgcaatatagtatttcaagagttgccaaaacttgctatttggaaaagaaaaatgttggatccctacctcataccatttcccaaaacaacttccagattaattaaagaccctgtgtttctttttttttaaactataaaagtattcaaaaaactataggaaaatatatttgtcttggggtaaggaaggcttcttaaaatataaaataaaaagttgtatggaagattaattaatttgaccacttcaaatttcttaagttgtgtatgctaaaagacaaaactagaggacaaatgatagtactggcagatatcacttattcacaaatcacacaaattaagagtacaggaaggctgttgggtccggtggctcacagctgtaatcccagcactttgggaggccaaggtgggtgcatcacctgaggtcaggagttcaagaccagcctgaccaacatggtaaaatcccatctctactaaaaacagaaaaattagccaggcgtggtagtgctagcttgtagttccagctgtttgggatgctgagtaggagaattacttgaaccctagagtcggaggctgcagttagctgagatcatgccactgcactccagcctgggcaacagagtgagaactccatggtggcatgcactttgggaggctgaggctggaggattgtctgagcccaggaattcaaagctgcagtgagctatgatagagccaccgtactccagcccgggtgacacaatgagaccccatctctaaaaatgaataaaaataagggtcgggtgagggggctcatgtttgtaatcccaacactttgggaggctgaggcagagggatcacctgaggtcaggagttccagaccagcctgaccaacatggggaaaccctgtctctactaaaaatacaaaaattatccgggcattgtggtgtgtgcctgtagtcccagctactcaggaggctgaggcaggagaatcccttgaacccaggaggtggttgcagtgagccgagattgcaccactgcactccggcctgggcgacagagagaaactggtctcaaaataaataaataaataaataaaataaataggtagagatagctatagcgacactgaaatatctccaaaagagttttttttgtttgtttgtttgtttttgaagtggagtcttgcactgtcacccaggctggagtgcagtggcgcgatctcagcttactgcaacctctgcctcctgggttcaagcgattctcttgcctcagcctcctgagtagctgggattacaggtgcgtcccaccacacccggctaattttttttttttttttttttttttagtagagacggggtttcaccacattagccaggatgatctcgatctgaccttgtgatccgcccgcctctgcctcccaaagtgctgggattacagacgttggccattgcgcccagcccaagatcctatttcttaagccctgtactgtgccaggctcagggttttgcacatgtgatttgatgagatctcacagcggcccattttacagagaaggaaatggagtcttagcaagctgtgacttgttctaggtcatatggtcacatataaatgaatacgatggtgaaactgaggtcctagcttaggcctctgcctcagaagttcctggtcttcagtactcacctataatggccactaaggggaatgagaaaagaaggaaggaatggagggagggaggaaaataaggatatctgggatgggattgggcaccaaaataaaatctgagtaattggaaaaggggtgtcagcaacaaaaggagagtggatggggtggctactcaccagacggagtgatgtctgtgtgacacagaggccctgtaggaggttgagggactagtttctttttcctttttttttttttgtctgaggcagagtctcactctgtcgcccaggctggagtgtagtggtgtgatctcagctcactgcaacctctgcctcccaggttcaagtgattctcctgcctcagcctccgtagtagctgggactacaagtgcccgccaccacaccaggctaatctttgtatttttagtagagaggggtttcgccatgttggtcaggctggtcttgaactcctgtcctcaggtgatccacccgcctcggcctcccaaagtgctgggcctcggctcccacaggcatgagccgctgcgcccaacagcgagttcttttcaaaaccctttgtggccagccccatctcattggtaacccaggaatctgagttcccagctcctatctcctctgggaaatgagaatcttatccctccctcctcctgtctcagtaggcagaaatttggacatccattgcccacctaccgaagaagtctgaacgcagacccctctggcctgggcaaccaagagttcaggcccttgaactccacctttccagggaacaatgatcgtagagtttctcctctcacgagttcaggaatctgggtccccatttccctcttctctcaggagctaagagccctgttcccagcccccttttcccagggaatcaggagtcctggcttccatccccctcccatataagaatctgggagtcctccctgtctcctgacctcttcctgcctcaagaaccagagatacctgtccccacctccttcctctttcgggaatctgtgttctcttgctttaggacccaggggtctgggccccagccctgttctttatttgaacctagaatcccaaacctgctgcctggtccccctgcagggtgtctgggtctccattgcctctctctctgcccccaaccccagccaggaacccagggagaagaaaggggtgactcacagagggtcagcagctggaggatcagcaccagggccatggtgggcagatacccgctagagctggagccagggcttggtcgcaccctctcccctcccaggaaatgaggcaacatcagaaaaccagacccagatcctcatttacggaagagagtatcgaggtgggggcctgtgggtgactgtgtcatagccctatggcactgtggaaaaattagcagggggttcagtcataacctgtggtgttcatttatttaactctagaaacaaatactagtcaggaggtggaggcaggaggatcgcttgagcccaagagttcaagagcagcctgggcaacagagcgagaccctgtctaaaaaataaataaataaattgtgccactgcactccagcctgggtgatagagtgagaccatgtctttaaatatagatagacagatagaaagatatctgtctgttttaaaaataagaacctattatgtgccagactcttgctgtcattgattgacagatagataaaaatttgcacctattatgtgccaggcccttgctgtgattgaaagatagatagatggatggatggatagatagatagatagatagatagatagatagataaaaattagcacctgttaagtgccaggcccttgctgtgattgattgatggatagataaaaattaacaccaattatgtgccaggcccttgctgtgattaattgatcgattgatagattggttgacagagaaaaattagcacctattatgtgccaggctcttggtgtgatactgtgttagatagatagatagataaaaattagcccctctaggccgggcgcggttgttcacgcctgtaatcccagcactttgggaggccaaggcgggtggatcacctgaggtcgggaagttcgagaccagcctgaccaacatggagaaacccccgtctctcctaaaaaagaaaaattagccggctgtggaggcgcgcgcctgtaatcccagctattcaggaggctgaggcaggagaatcgcttgaactcgggagtcggaggttgctgtgagccgagatcgcgccattgcactccagcctgggcgacagagctagactcaatctcagaagaaaaaaaaaaaaattagaacctattacgtgccagaccctcgctgtgccatgttggcaggcacagagggaactcagactccgttactgctctcaagcagcagctaccagtccgactgaaagaccaagaccaggtcagtttctttttttttgagacggagtctcgctctgtcgcccaggctggagtgcagtggtgtgatctcggctcactgcaagctccgcctcccgggttcacgccattctcctgccttagcctccccagtagctgggactacgggcgcccaccaccacgcccggctaatttgtgttgtatttttaagtagagacagggtttcaccatgttagccaggatggtctagatctcctgacctcgtgatccgcccgcctcggcctcccaaagtgctgggattacaggcgtgagccaccgcgcctggcccagaccaggtcagtttcttaagtgatctgagctataatggcggtaacagagcactgtgagagcccgcagaaagctcctaacccatctgggatgagacctagcgcttccaggacgagccgatgttgagctgagacctcgaaggacaggttagtcattcaccttctcccgggctcagtttcttcgtctgtaaaatgggctttcatacataaactataaaatggggactattttgttccgccttaggtgggtcgcagcaggaggactagtcactccggagcgacttctaggctgagactaaggagattccacgcaggtccgcaaagtcaggcttgcgcttgctcctgacaccacttcctttacctccacggctccatctttgttctgcgcgagtgcgcacgcgcaggctccgaaagcgggccgtcgcacagagggaccacaactcccagagtgctccgcgtccttgctttcgcctctacttgtgctccagggcgcacgcgcagccctgggagcgggttctcgcgcatagggaccacaactcccagggtgctccgcgtcctcgccgctgtcgccgccgcggagacaaagatggctgcgagtaagtgcaggtgccggtggcgcacggggctcgggtagttctgggaacctctgggcggtcctgggactgaggtgcggcagggcaggggtggaagcgatggggtccgtgctggaggggaacgcagaagtcacgagggggctcctccagggcaggggtggcacgagagggttagaggtcaccgggggcagctacttgcaggggtgacgcttcttgccaccccttcaggagtcggcgccttcctcaagaatgcctgggacaaggagccagtgctggtcgtgtccttcgtcgtcgggggcctcggtgcgtgagtgctccaggcgcaaacttgcatcgtccacccccgtccccctacatccctccatcttgtacccctaaagccctatcgccgccctcgggtcccctctagtgtgtctgcacccccacggcatccccttatctatccccatacccattataacctctccaccatcgccccccgcgttcctctccacctacccaatacgctcttaacccctctaaatgagacgttctcaaccctgcttatgccttaacacctgagcaccaaaaaaaagtccagatcctcctcctccttttcatctttcctctcccccattctgaattgagttggcttgggtggaggtgggactggggaatctgtgtcttgtgaaaatccccgtatgatcccaatgtgccttgctgattgaaaatctctgccctctgccctggaactgccctactcacactttaattagcaccggagttcctgcagggatgggggcgggggattgttaaaatgtagcttttttttttgcgatggagtctcactctcacccaggctgaagtgcagtggcgcgatcccggctcactgcaacctcggcctcctgggttcaagggattctcctgcctcagcctcccgagtagctgggattacaggcgcccagctaattttttgtttttgtttttgagactgagtctcgctctgtcgcccaggctggagtgcagtggcgcgatctcggttcagtgcaagccccgccttccgggttcacgccattctcctgcctcagcctcccgagtagctgggactacaggcgcccgcccccatgcccggctaattttttgtatgttcaatagagacggggtttcaccgtgttagccaggatggtctcgatctcctaacctcgtgatcctcccaactcggtctcccaaagtgctgggattacaggcgtgagccaccgcgcccggccagcttttttttttttttttttttgagatggcgtctcgctctgtcttccaggctacagtgcaatggtttgatcatggctcactgcaacctccgcctctagggttcaagtgattctcctgcctccgcctcccaagtagctgggattacaggcgagcaccaccacgcccggctaatttttgtatttttagtagagacaaggtttcaccatgttggccaggctggtcttgaactcctgaccgcaagtgatctgccttcccaaagtgctgggattacaggggtgagccactgcgcccggccaaactgtaggttctgattctgtaggtctggggtggggcatgggattctgcatttttgaagagttcccaggtcttgtcagtactgctggtccaccagccaggcactaggttaaggttctgaacacttattcagtatggcagccaccagccacaactggccactgagcatttgaagtggtgctggtatgaattgaggtggtataagacactggatttcaaaaacttagtataacagagtgtgtaaactaccaataatcttttgttgattacatggcgaagtgatgttttggatgtactatggttttttttgtttgtttgtttttgtttttttgagacggagtttcgcttttgtccaggctagagtgcaatggcctgatctcggctcactgcaacctccgcctcccgggttcaagcgattctcctgtctcagcctccttagtagctgggattacaggcgcatgccactacacctggctgtttttgtattttcagtagagacggggtttcatcatattggtcaggctggtctcgaactcctgacctcaggtgatccacccgtctcagcctcctaaagtcctgggattataggcatgagccacctcgcccatccaagtatgtttcttaaaatttgtttcatctgtatctcttatttttactgtagctactagaagatataaaattatatacctggctcttaccatctgtcagacagcactggcctagaacattccttttatgaactgtaccccatcccccaggactcctggctcccaccctaaatggactgtggtcagtgactgttgtttgtgcaaccctttctcctccagtttgtaaggctttttttttttttttttttttggtgatggagtctctctctgttgcccaggctggagtgcaatggcacaatctgggctcactgcaacctctgcctcccaggctcaagggattcttctgcctcagcctcctgagtagctgggattacaggctcctgccaccacgcccggctaattttcgtatctttagtagagatggggtttcatcatgttgtccaggctggtcgcgaactcctgacctcaggtgatccgcccacattggccgcccaaagtgctgggattacaggcttgagccactgtgcccggccaaatttgtaacagtcttgatttctccagaacagtcccatgacactacccccaggatgctccatgatgaccctacactcaaacgtgctcattccatgaccaaccccactgctgcctcctccaggccccacgtatctgtgagtgttaggctccaacccctacctccacttaaccccccaaaaaagagttttaaaccctcctgtctataagtagggatcccaaggtaccaaggatcctcctggacgtgctggccctccctgctgccctccccctgcgcactttatcttccctttgccaaggctcaccttctcttcccctctcttcagagccaccttcccctgggcctcacccctgtgtctctccacagctgtaattctgcccccattgagcccctacttcaagtactccgtcatgatcaacaaggccacgccctacaactacccaggtgagtgggggccaggcagggatccccggaataggcccagcctccctgtgctggcgtaagggcagttatgggcaggtctttcctaagcagttatcagagattctgcagtggtgcccggaccccccgttccattttttaagaattgagatataattcgtatactattctgtgtttgtgcttcgtttttgttttttggggtttttttgagacagagtctcgctctgtcgccaaggctggagtgcagtggcgcgatctcagctcactgcaagctcagcctcccgagtagctgggactacaggtgcccgccaccacgacacgcaaactttttcgtatttttttagtagaggcggggtttcaccgtgttagccaggattgtctcgatctcctgaccttgtgatccactcacctcggcctcccaaagtgctgggattacaggtgtgagccaccgcgcctggcctgtgcttcgagtttctattacctttccagatttctgtctctctctgggttcccatctgtggtggtttcttggtctccatcttctcaggtttctgtcctgtttccccatctcttttgaccctagctctctagtgcgcgggatctctccctcgctatctctctggttttccgtgtctctcagtctctgtatttcccgcctctttctgcatcactgattctctgacccttcccctctcacccctggggtcccccttccctctctgaacataaagcgacagaccagctcttctctccagggccctggagacgtgctggtctcagtggcccacctcctgccccacagtgcccgtccgtgatgatgggaacatgcccgacgtgcccagccacccccaggaccctcagggccccagcctggagtggctgaagaaactgtgagcacctccactgacagaggcggcccctcccacggctcccaataaaaatgtgaaaaccaacccccgaacgtgagcatgtgtgtgatcagaggtgggaacaagtagacggtggccggggtgagtgtggggtcagtttattgggcatgcgtcagtcagaggctgggctggccagggtcgggtagggcagcagtttgtctggaccccgagaaacccaactggaatccagggcctcatctgcttcaaagccaaagtcttcctcaaccttaatctgcaggagataaggaacaaggtgttaacaggcctgggaatctagaaaatcccatcagcttcaccatttttgttttcattttgttttgctttttaaagagacagggtctcactctgttgcccaggctggagtgcagtggtgccatcatagttcactgcagcctctgcctcccaggctcaagtgatcctcccacctcagcttcccaagtagctgggactacaggcacttgccaaccaagcctaacatgttttttctttttggtagagatggggtctcagtatgttgctcaggcaggtctcagactcctggcctcaagtgatcctcccacctaggcctcccaaagtgccgggattacaggcatgagccactgcacctggccagcctcacagttcttgtctgcccaggccagtcaccttcctccttacacctcagaggcaatcccagtgttcctgggtccagatgttcttccagctttcctccccacactgggccttcccttccactccgtcttctctgatccttccttctcctctactcccagccttctctagctatttttccttctccaggtcttcctctttccctttccaactttgcctcctttttacccaagcctttaccccactttttccaactacttccctgcctgatcctaggcctccaacatgtcctggttcacctcccttctccaactttccccagccctgggcccctcggggtgcagaaccaaaacccaagagccctgaacctaactcagccccagccctggcccctccccttgagtcccccctccttacctgcactggcgccggctctggagccccagtccctccccttgagttcccgccttcctcacctgcaccggggccagctctggagtcagcgcatttcctgctcggcgtccatcccgtggcactcgccgcctcttccgcccactgggcccctcaccgggggctgggctgccgggttctgggggtgcaggagtccttctgggcggggacagtgtctctttctctggaggctcattctccgcattgcctggggtgggggcatccgtgccctggctgccctcatcctggcaggcaggagggggaggtaggtgatgggtgggtcctgagctcccagttcctgaccctcctggaggcccaacactcacctccagcacaatggtgaactggctggcccggtagtcatccccgtaggagtccagcactctcatgaggaacctgctcagggggagaagccaccaacggaataacttatctcctagcggctggggaaaagggccacaggatagagctcagctcccactccactcaacgccaaagctgtcctggagccagacggtcctgagctctggcactggaggcctgggagccatgcccttgaccagccttgagacctcgagcaagacaaggcaaccattctgaggctgagtttcctgctctgcaaacgacatgacaccctcggctggatgttgcagcggtgacactgaagtagtgacaccagacgatttctgtacttaatgtgatgtcagcacttagtaaacattcatatgtgagttataatttttattgataactgaagagaggggagtacagaacgctcctcctaatgacctcacctcttataaacacccccttctcttttttccccagcccctgcctccagagttccttaaggttcaattgatggaatgcctcctctgcaccagcacctgggcaggtttgttgttgttgttttgcgacggaatctcactctgtcacccaggctggagtgcagtggcgtgaatttggctcaccacaacctccacctccctggtaccagcgattctcctgcctcagcctcccgagtagctgggactacaggcgcctgccactacacccggctaatttttttgtatttttagtagagacggagtttcaccgtgttagccaggatggtcccgatctcctgacctcgtgatccgcctgcctcggcctcccaaagtgctgggattacaggcatgatgagccactgcgcccggcctatttcaacttaagtgaaaatctcacctgtggccagcggctaccgtgctggacagcacaggtacggacagaggaaccctgggagccgcaggtttcagctttggggagggaggatgaactagcagaggcagccaagaaggaacagccggaaaggcaggagaccccaggttgctgggtgcccaggatggcaagaatgggctccagggaagagcacatagccctgggccactgtgccgagcctgagccaaggactgagatgagaactgtggttgactcagcaacgtggagccattcctacaaaacttgctccagttttgctggtacagggacactgcgagtggcaggggcagcagccacctgggcaggttctgtggagacacacagtgggaagctctgagctcagctcaccacctgcaagctccgacaaccctgccgcagcctcatgatattggtgctgcccttagttgataggaaacagctcagagaagggacactgcttgcttagagtcacacagcaaaaaaaaaagaaaatacttgcagtcaggtctgtgctcgtgtgccttccatcctgctgttccctcccttcagggggaggatgccctccacccggccctccctcagtcccagtgctcagccctctccacccggccctccctcagtcccagtgctcagccctctcctccaacaccgaatcccactcttcctccttgtttgcctcagcccccggccctcatctccggcttctccttgtggcttgtgagggttgggtggatgtggaagtgggagagacagaggggctgggagcatttgggagctgaggctcacaggcccagaggggacagagaaggggttacctccgttcctgctgcagcctccgagttatcctctgcacctgatggagcctgttcaggacccgctcgttcacctatggggtgggaaacgcccatcagctggatcccacggctcccgttcatttgtttaacggatgtttaatggggcacgcactaaactctggagactggccaaagaccatcccgtggcctgaggtccttccaccttcccatccctccggctcccctctcaccatgccacagtcctgagtgccctccagtgggggccttccgcgtgctgttcctctacctggaccctctccccagtcatccgcacaacttactccccactccaagtcttaggtcaactgttacctgctcagagagcctgaacctcccattaagtcgaaacacaccaggccaggtgcggtggctcacgcctgtaatcccagcactttgggaggccgaggcgagtagatcccctgaggtcaggagttcgagaccagcctggccaacatgatgaaaccccatctctactaaaaatacaaaaaattagctgggcgtggtggcaggtgcctgcaggatagtcgcacgaacctgggaggtggaggggtgaagtgagttgagatcaccccactgcactccagcctgggcaacagagcgaggttctgtttcaaaaaaaaaaattgcaacacacccgaccccccttcccatgccagaaccccacccggccattcactcctggctttatttcctcctagtgctcatctgaggaggcaggacgcagcctctccgcctctttgcttattctgctgactgaccgcctctccagccagagcatgagctgaaaaacgacagcaacttgtttctacatcccgtgccttaaccagagcctggcacgtagtacatcctcgatgaacatttgcagaatcaatgactttgcaaagtgagaagtgcttggtgaataccaaagagtcagacatgctggaggttagggcaggaggtgcgactttagttacgacctgcagagaaggcccgtgggcccagacttgaataaggaggagacaaaggggtgacaggaggaaagtatgccaggctgaggggacagccctgcacgcagcttctgaggactccagcctagacatggagggagagatgtgactcagccaaacagggacccaaagacagtggctgaagcaggtgctgctcctgggtcagaaagacctgagttccgggcggggcacagtggctcacgcctgtaatcccagcactttgggaggccggggcgggcagatcacttgaggtcaggagttcaagaccagcctggccaacatggtgaaaccccgtctctactaaagatacaaaaattggccggatgttgtggcacatgcctgtaatctcagctactcaagagtttgaggtcgggagttgcagaccagcccggccaacatgatgagacctcatctctactaaaaaaaaaaaaaaaaaaagaaaaatacaaaaattagctgggtatggtggcgcatgcctgtaatcccagtttctcaggaggctgaggcaggagaatcgcttgaacccaggagctggaggttgcagtgagccgagatcacaccactgccctccagcctgggtgacagagtaagactctgtctcaaaagaaaaaaaaaaaaaaaaagtgccaggcacggtggctcacgcttgtaatcccagcactttcagaggccaaggcgagcggatcacctgaggtcaggagtttgagaccagcctaacgtggtgaaaccctgtctctactaaaaatacaaaattagccaggtgtagtggcgcatgcctgtaatcccagctactcgggaggctgaggcaggagaatcgcttgaacccaggaggcggaggttgcagtgagctgagattgcagcattgcactccagcctggacaacaagagcgaaaatccatctaaaaaaaaagagttcaagttttggctctggcttggcacagtggctcatgcctataatcccagcactttgagaggccaggagttcgacaccagcctgggcaacagagtgagaccccaacactcaaaaactaaccaaaaaaattagctgggcttggtggctgtagtcccagctccttcggaggctgagattgctagagtccaggatgttggggctgcagtgagccacagtcatgccactgcactccagcctgggcaacagagaaagaccctgtctcaaaaaaaaaaaaaaaatctcagatctgccactgctgagctctgagcttgggtgcattacttaacctctctgagccttgattttctatacttgtaaaatagtagtaatctattcctgggggtggattaatggcagaggctccagttgagtccgtttgggccttggtgtctgtctgttaaacagggtttggaatatgcccctggcctctagccttcctccttacagaactccccaatactgtcattaagaattgaggccagatgtggtggctcatgcctgtaatcctagcattttgggaggtcaaggcgagtggatcacttgaggtcaggagttcaagaccagcctgggcaacatggcaaaaccccatctctacaaaaagtacaaaaattagccaggtgtggtggtgtgtgcctgtagtcccagctattttgggggctgaggcaggaggactgcttgaacctgggagactgaggctgcaatgagctgagattgcgccactgcactccagctttggtgacaaagtgagaacctgtctcaagaaagagaaaaagagttgaaggccaggcgtggtggctcaagcctgtaatcccagcaccttgggaggctgaggtgggcagatcacctgaggtcaggagtttgagaccagcctgaccaacatggtgaaaccctgtctctactaaaaatagaaaaattagctgggtgtggtggcgggcgcctgtaatcccagctactagggaggctgagtcaggagaatcacttgaacccaggaggtggaggttacagtgagctgagatggtgccattgcactccagcctgggagacaagagcgagactccacctcaaaaaaaaaaaaaaaaaaaaaaaaaaaagttgaattatttcccccaaaagagggtgttgaggctttaacccccagtacctcaggatcaccttatatggagacagtgtcgttacaaaagtaatcaagttcaaatgaagccagtgggtgggccctaatccagtatgactggagtccttataaaaagggtaaattgggacacagacacacacacagggagcagcaatgtgaagatgaaggcggagatcagggtgatgtttgtacgtgccaatgactgccagaaacctccagaagccaggggagaggcctggaagattctcacaaccctgtcgacaccttgccttggatgtctagcctccagaactgtcagacaggaatttctgtgcttgagggaccctatttgtgataagttctgggagtccaagcagactaatacaactgtcttcagagtttcaggcatccagacctgatgctgttcctcccccatttgaaacccttcagtggctccttcactctcaaggaaaaaaaaatatccagacttcttgtcctggtgttcctggcctgccaagatctgagccctgcctgctgtttaatcctcattgattgattgattgattttgagacggagtctcactctgtcacccaggctggagtacagcagcatgatcttggctcactgcaacctccgccttccgggttcaagcaattctcatgcctcagcctccctagtagctgcgactacaggtgcgcaccaccacacctggctaatttttttgtattttagtagagatggggtttcaccatgttggccaggctggtctcgaactcctaacctcaggtgatccgcctgcctcagcctcccagtgctaggattacaagcgtgagccaccatgcccagcccatccttattctcagcaaggaggctattgcagtcattcagcccagacagctggagtttgcaatggcagccatagggatggaggagaggagaagggtccagagacactcaagaggcggaatgaatgagtcgagaggagtgaatcctggcaggggtatgggagatgtgaagagcttgggctttcacctgtgagcggtgccacgcattgagaggcccccgggagacatcagagaacccatctgcgttgtcagggaagctccacgggagatggcccttccaggggcccggcacagggccagacacataatgcatgctaaatgactgaatatataagctaaatgactgaatatatcagcaagccaagaaaggctgggcatgtggaaaggcagagattgcggggggcggtagtttaggccaggggaccccaaaaccgggggatccgcactcacctacctgctcgatctcccggcagcgccgacctagtgcctggtactttctgcgatttaattcccgctggcgccgccgccgaccccgggctgcctcttcctcttcatctcgctcccggagccctgagccgcccagaccacctgacacaaactccacttccgtctccagctcgctctccaggatgtggccaccaaataggggaggcaacgccaactctgagcctggcggcgctgagaactcctcaaagcccacggctgccatggtcctgagaggcagggaaaggctcaggggccctggatcctggacccccagccccttctcccactgaaccaggagcccagaccccaacccctcctccctgagatcctagaatccaggcccccagcccctcctccctcagaccgtagaatccagctcccagccctcctccctcagacccagaagtccaagtccgcaacccacccttcgcagcacccacagggttcaagccctgaccccctcctcccaggatgcaagagtccagacctccagactttttctctccaaggacccagggagtccaagccccaaccctcaaccagacgcaagagtcctggcttccaacctcctagtctgtcagatccagcagtccaaacccctaaccttctcctccctcaggatgaccccagtccataaaagggttctaaggtaaagcagttgcatgaactacaacccccatcagacctcagcgtaaaagctcatatggttgcacacaatgcagctgcactgttttctgggattcgcactttttcacaagggctcagccacatacccttctctctgctccaattccatctccgcgacctccggaagccccgggcctcagagcttccgacctcttcaatctgtaggttaagccgttcgcaaaactacttgtcccatcaggctcagcagccgaggacggcgggacgtggccctaggccttgtgggagttgtagtttcctgtttccggcttcgcttcggcccacccccacgtccaccccgaatccctgcttaaaggccttgctttcttgtctaacgccgcaaccagtcctctgagttgccaacgtctttcttcttgtctcgacgccccgtcgtccggccacagcgattctctgcttagcaggatcggtccacagcgggacgtgagtccctttcctcctcgcggcttaccgcctctctccgcctagtgccaggtgctaataaagttgttgtttcaaatgcggccaggaacatcgcgagcggggaccaatcagagagtagctttgcctctataacggcgcgagagtgagacgtcatcggtgagcgactaacgctagaaacagtggtgcgcggagaggagaggtgagtgtgatggggaccacggggagcgggaggctgggctcctgggtctgggagaagaagtgtgtgaggaaaaaggcgggtctttacagcttggtttttgtttttttgttgtttgtttgttttgagacggagtctcgttctgttgcccaggttggagagcagtggcgcgatctcggctcattgcaacctccgtctcccgggttcaaacgattcttctgcctcagcctccagagtagctgggattacaggcgcccgccaccacccctgactaatttttgtatttttagtagagacggggtttccccatgttggtcaggctggtctcgaactcctgatctcgtgatccgcccgcctcggcctcccaaagtgctgtgattacaggcatgatccaccgcgcctggccagttgtttgtttgttttgtctgagacggagtttcgctcttgttgcccaggctggagtgcagtggcgcgatctcggttcactgcaacctccgcctcccggattcaagcgattctcctgcctcagcctcccgagtagctgggattacaggcgcgcaccaccacgcccggctagttttttgtatttttagtagagacggggtttcactatgttggccaggctggtctccaactcctgacctcagatgatccacccgcctgggcctcccaaagtgctgggattacaggcatgagccaccgctcccggccttttacagcctgtttacccaaaagtcttaatatgcgcctaccatggtgtggccctggggatgtggaaggagcaaaaattgttcgctaccctcttagagctttggttgatgcctggcagacaggctttatcaaataattacttcattaatcacaaatgtgtgaagtgccttactgtagacacgcagagcgtgcgggacacgttatcacaaagcaacctcctgtagtctagagtggggcgtgtgggtcagggaggtggaacgtgagagctgaaggctgaggagatgctgggctactaagaagtgaggagagccagacgccatggctcactcctgtaatcccagcactttgggtggcccaggcgaaaggatcgcttgagcccaggagtttgagaccagcctgagcaacacagtgagaccctgtctctacagaaaaatttaaaaattagccgggcgtgctggtgcgtgcctgtcatctcagctatcgggaggctgaggcgggagaatcgcttgagcccaggtgatcgaggctgccgtgagctatgatggcgccactgcactgcagcctaggtgacagagcaagacatggtctcaaaaaaaagaaaagaaaagaaaaaacaaagtgaaggaaagggccactttagttacaagggactcctgtacaaagacctggaggcgggaagagaccgataatgtaaccaactcaagtttctgctactcagaggcagaggaagtggggggtggtgaaagtaaagcagctttactgatcaaatgctcgcagatgagaaatggccaagctaatgtctttagaagaccatttcaagctttaggctggggagaggggcttaaaaaggggaactttgaatgggaggcatacaggagtggtgctgggtacaaggtatgtgtgtcttgctccgaaggctgtcttgagtcacgggccacctggagcatgggctggtgtcaagtcaacaatggccacgttgtagattgatcgccttgaggtgatctctggagttttgcagctgggtttccatacctagtttgtttcaagattagcccctgcggcgaggcgcggtggcttacgcctgtaatcccaacagtttgggaggccaaggtgggtcgctcacttgaggtcaagagttcaagaccagcctggcttacatagtgaaaccttgactctacaaaaaaaaaaaaaaaaaattagctgggcatggtggcaggtgcctgtagtcccagctactcaggaggctgaggcaggagaatcgcttgaacccaggaggtggaggttgcaagtgagccaagactgcgccactgcactccaacctgggtgtcagagccagactccatctttaaaaaataaataaataaagattagcccctggaacttctaagtaagcacatagataagccagcagtgcaagacagtatctagtgggaaaggagggaaacaaagaatttcaaagtatgttttcaaggctaaaggcaagaaaggaataagaaagtttgcaaatgcatttggaatctacaccacttggttccagtaagtcttagcaaggtggcggtcataggggtgtgctgcgtcttgcacaggtcggagctggagactcgccagtgaacaaaacaaactaaagcacctgttgtcgtggagcctgcatgctagtggggttgataaagaaggaccagggtcttctgggggagaatcatcgctcagtaataaggagggactttgtcggggcaagtttttagggaacgctgctgtccctccccaggcctcgggatgtctctggcagatgagctcttagctgatctcgaagaggcagcagaagaggaggaaggaggaagctatggggaggaagaagaggagccagcgatcgaggatgtgcaggaggagacacagctggatctttccggggattcagtcaagaccatcgccaagctatgggatagtaagatggtaagaggacaagaggtgttcctagcagggggctctagacagaatctcccagaagggggtgatacaggcttctttttgaagagtgctggattctgactgtcttctcctttcctacagtttgctgagattatgatgaagattgaggagtatatcagcaagcaagccaaagcttcagaaggtgcttcctcccactctgtgcccctccccatctcctgtctctcctgccaggccccctggctccctggctgcttgtggctgggtatatctccttctcagccttttccagagccttcttttttttttgtttcaccccaacccgttcccttttccactaaatatatattgcattgtaaagctcatgcttcttaagtccttcctgtgtgctgagcttactgatcatgataggactcagcttgaggtttcccagacttcactgattcacatgaccggttacagggtttttgccacatctataagccgcttatcctattatttgcttaacatattctttgagtctaggactttttttcttaaatttatctgagaaggaagcaaattgctaccatgaatggaaaactggtatcatttggcaaagacaaagtcactgtataaaaatagatatataattatttaggaaccacctaaggccgggcgccgtggctcacgcctgtaatcccagcactttgggaggcggaggcaggtggatcatgagttcaggagatcgagaccatcctggctaacacggtgacaccccgtctctactaaaaatacaaaaaattagccaggcgtggtggcgggtgcctgtagtcccagctactcaggaggctgaggcgggagaatggcgtgaacctgggaggcggagcttgcagtgagccgagatcgtgccactgcactccagcctgggcgacagagcaagactccgtctcaaaaaaaaaaaaaataacctaaaaccttttctcatgcccaaattgagagaacactagcttatctcatgagtgctcagactcactcttaagagggcagtcctgttaccattcctattcttttttttttttccttgagatagagtctccctctgtcgcccaggctggagtgcagtgatgtgttcttggctcattgcaacctccacctcccgggttcaagcgattctcctccctcagccttatgtatagctgggattacaggtatgcaacaccatgcctggctattttgtattttttagtagagatggggtttcaccatgttgaccaggctagtctcgaactcctgacctcaagtaatccgcccacctcggcctcccaaagtgctgggattacaggcatgagccactacgcccagccttcccattcttcttgaatggaatttgttgatgacaggaagccataggaggtttctggggaaagaagtgtagtgagagggcagagtttcgggagactcactgcttgctttctttaacgtttacctgggcacccagttgaatcgcccaggtctttgctctcaaagtactcaaggtctagtggaagaggcaggccaggttccagacagctatcagtggtggtaccaagctggggacaccggagccacaggagggactggctgaccctgccccaggtgtcaggaagaatcgatagctgaattggactgtagagcatgaatgcatgtgccaggcaaagaaagggagaagggggcccagggaaagacagcggcaggcccggggcctcagatatccggagagagaatcctgcagagttccagatgccaggccaaggaatttctccctccagagggttatgggacacagaaagtgacatttcctgatgtcaggccaggctcagggatggagtcagaccccgtcacacccggtgtctggttgaggaggcagaggtgaaacatctcacaagctgtggcagtccctgtttactggaggtgcacaagtgctgcgggtacacagaggaggcgtctgatccttccagaaagggagggaaggattctgagtcgctgcctgagtcttaaggacttaaagagccatttgagcatcagggttaggagtgcagactctgacgccgccctgcctggtgtcagatctgagctctgccttctactggctgtgacatcaggcagttagtatttgcatgacttttaaacacaacatctttttgtttgtttgttttttgagacagggtctcactctgtcacccaggccagaatgcagtggcacgatcccagctcactgcagccttgaccttgtgggctcaggcgttcctgcctcagcctcccaggcagctgggaccacaggtgtacaccaccatgcctggctaattttttttctttaattatgtgtagagatggggtctccctatgtcgcccaggttgctctccaactcctgggctcaagcagttctcctgcctcagcctcccaaagtgctgggattacaggtatgagccactgtgcctgacctcttattactaaagcacaaagaagcgttttccagaaacagacgtggggtaagggatgctctggggagagggagcagcacatgcagaggccaggaggggtctggcgcggtggctcacgcctgtcatcccagcactttgggtggtcaaggcagatggatcacctgaggtcgggagttcgagaccagcctgcccaacatggtgaaaccccgtctctactaaaaatacaaacaaacaaaaaaaattagccgggcatggtggcacatgcctgtaatcccagctactcaggaggctgaggcaggagaatcgcttgaacccaggaggcggaggttgcagtgagctgagatcatgccactatactctagcctgggcaaccagagcgaaattatgtctcaaaaaaaaaaaaaaaaggctaggaggagtgggtgtctggggcactgtgatcactcctttatggctggagtggaataaaatgaggtgtggtgagaggatggggcgggaagggcgggaggccagactgcagagctgctgagtcagcaaacaggaacgggggaactccctgtgtgccaggtgctgtcctgggtactcggctgtgggtacagccaacgcaggcacagcactggtccctgcagagcttccggagttggggaggccctgaatgtcagtctgaggactcggtcattagccttggggctgtggggagccgtaggaggtttcacacggtcagttctggggtagatggggtcaagtctagactggtgtggagggagagggattgaaggcaggaacacaagttcagggatgtctgcagacatcagcctgtccctggtttactcttcagcccctccttcctgacccctcccaacttcatcctccgcctcctccagctgcgggacccgagagggggtagggatttagatactcacacccatgcctccgtgtcctcacagtgatgggaccagtggaggccgcgcctgaataccgcgtcatcgtggatgccaacaacctgaccgtggagatcgaaaacgagctgagtgagtgctggggggcaggcggagacagccccgtgtgacgtccctcacgccccctctcccttccccactggcctttcccagggtcctgcccctaagcccaagctcagatcgaggttgacctgctgtcacagagtggctgaaataagaaggaagtgcgttctctcgcgtatgagtctgaggagcactcggggatggtgtggccgcttggctgcctgtagggccccggctctttccatcctgttggtcggccacctgcctcacggtgcgaggtgactgccccacctccagccatcacctccgcattcccaccagcaaggcgcttcttttctttaagaacatgtcactgcagctcacgttttacagaccagaactaattcccctggtcacacctagcggtaaggacggctgagaaaggctgtatgctggtgcccgtgtgccaggccacaagccagggcttcagttactaaaggaagaaggggacatgggtgttagggccaaccagcagagtctaccttccatctcacccgacaacctcctgtcccgtttaccctagacatcatccataagttcatccgggataagtactcaaagagattccctgaactggagtccttggtccccaatgcactggattacatccgcacggtcaaggtgagcgcagagaaggtggggtgcttctgctggcgtgaaggggcaggcggggctcactctcggaccccctcccagaggcctgagggtctggagacgatggagaggagtggacgagggctcagtggtctgctctgcccagcgtgggagggacggagcctggacaggactttctcagggctcccctccaaccccagtctcccgagagggcttccccgctggcctgacccacgctgctcccgctgtggttggagccggtggcattggagttgacatccgaaggttgacacagggcaggcacacggagatttgggggagagagacgtctaagtgcagagagctggagagggaacaagtggggaggaagtgaggcggggaaggaggggacggggaagaggtcggatcacgtccagcctttgggtcttaggagaaagccaaggaagggtttcggaaaagaggggcaggtgtgcgtgagggcggggagaggaggaggtccccacgcatgtccaggaaaggattaggatggcggtggggaagcccctgcagggaagcgaggccgcggatttgcactccgacttgacgcaggccagaggcttgtgaggccacagtctttccagacgccactctgcccgggctccgtttccaggtcagcgaaagcagggcagatggtgtggatgcttgacgtggtggaggcaggaatggtgtggatgcttcaggcggtggaggcaggagaggcccccagtgcagagaccctgactgtcccagtgtccctaagaagagacctgaggaggtgctgagcaagagaggttctcgagccttcctgagttcccgagcctcccctatcttctctgctcgcccccaggagctgggcaacagcctggacaagtgcaagaacaatgagaacctgcagcagatcctcaccaatgccaccatcatggtcgtcagcgtcaccgcctccaccacccaggggtatgtccgcttcgagggaggcgccgggccctaatgggattggggattaggctggagctacacacgcaggtgtacacacgcacacacacatacacacatgcacacacacacacagaaccgagagggctggggctgggcacaccaggcaggcgggagacccaggaggctgggcccacccgcccctgcaggcagcagctgtcggaggaggagctggagcggctggaggaggcctgcgacatggcgctggagctgaacgcctccaagcaccgcatctacgagtatgtggagtcccggatgtccttcatcgcacccaacctgtccatcattatcggggcatccacggccgccaagatcatgggtgagtccccgggctgggtcccatggagcgggggtctgctgacactgtgaccttgggaaagctacatccttttctgtagaatgggggctttggcacctggacctcagcaccccgtctccctggacatcacagaggtcagccagcctggcacacagcaaagcctcatctgtgggaaaaacactcacccacagctccttctccctcccctgtgccggaaacccagagatgaccacacccaggccctgttgtcagggagctcctggtttggtgaaaatggttccaaaacacagccatccctggaacggcgttagtgtggcttagcacaaacgtggtggtcagcttcctgttgggggcctcctccctgcacccccaggccagctgccctccctctctgagcctcctttgcatctgccccttgcggaatgggccaggtcgcccgcctggcagggccatcgaggaatccaaccagaacttcatgtaaaggtgcccagcacacgtcgagcccccaggcagatttactcacccccacctctctgctttcttctgaccgcccccccttcctccctccctcccaccgcaggtgtggccggcggcctgaccaacctctccaagatgcccgcctgcaacatcatgctgctcggggcccagcgcaagacgctgtcgggcttctcgtctacctcagtgctgccccacaccggctacatctaccacagtgacatcgtgcagtccctgccaccggtgagcccactgcgtcatggcccctcccccggcccccctggagccttccgctgtgcccagacagcctgagcagccacccaccatctggcccagctgacggtagcactcaggagctgggaacagggtggcatgggacgtgagagccagggctctgcagcagaccagctccagcacccaccagtcaggtgactgtgggcaagaggcatgagcgccctgtgcctcagtctcctcccctatcaaatgggagcacagcgcctgcttcatgagttgggacgagggctcagtgcacatgaagcacttacagttcaggcctagctcacgacaagcagcgtcgggttagcgtgcaactgctccgaagaccaccctcaggtttgaccattcactagaaagactcacagaatccactgagggctgcacatcagccatggggagagacacacaggaggggcaggagaggtcaccaacctcggagcttcccgggtcctctccctgcagtcgggacacatcaccatcccagcatcgacgcctgacagcacacacacaggcccgctagcctggcggggcgcagtggctcgtgcctgtcatcccagcactttgggaggccgaggcgggcagatcacctgaggtcaggtgttcgagaccagcctggccaacatggtgaaaccccatctctaccaaaaatacaaaaaactagctgggtatagtggcacacacttataatcccagctacttgggaggctgaggcaggagaatcgcttgaacccaggaggtggaggttgcagtgagctaagatcataccactgccctccagcctgggtgacagagtgagactctgtctcaaaaaaaaaaaaaaacaagcaagacaggttctgggacagacaggcctgggtccagaccctgctctgtccaactgtggcgagttacctcaggctcacggccctgtgccctgcctggcctcccccagggatggggagaacaatagcactgatggccaaggctgggcaggcacttcctggccccaccccccagccctgtgtggggttttttttgtggtcttttctgcgaccctttaggtcaggcactgctactggaacacacccagggaggctggcaggtcaccccatcctgggaggagagagagtgggcgatagaacccaggacgggtgggcctggggctcggggctccagctgcctcactgcacccctgccatcgccaccgcctcacagccctgggcatatgggttaaacctgccccagggagcctgatgtcttgtcacccaggcctctgcctcttcatttggccatctcacatcggtccaggcacaggccgtagacaccacaggcctgtaagggaggccagggctggccatcgcttcactgtggctgacagctgggctctgtttgcagtttggattggaaccctggctccatcacctgctggctgtctccctggccacatgacttgaagccttggtttccacatctgaaaagggggtgcaatgatcacaccagcccgatatttgaatatttgatgagatgatccgaggggcgtgcttagcatggggctggcatccaggccgagtgcactccccccggcgtctccacagtcaccaccgtcctcgttgtcagcgtgccttactgtcatccttacctgatggccacttatcagctgggacatggctctgtgccctgccctcatcccctcttcctgtgaagtaggagctgagagcacacacctctagagcccaagggtggaaagcccccttccaggaccccaggtagagccagaggaggagcgcgcgcggttgctttgctgttacctctgtctgtctgtctcacacagattccacccccgttttccgttgctccaggatctgcggcggaaagcggcccggctggtggccgccaagtgcacactggcagcccgtgtggacagtttccacgagagcacagaagggaaggtgaggagggaaaggtgaggggcggccgggcgtcttttcctctgggcctggggtgtctctgcagggagaccctcagcagggagcccaccccagcgagcactgtcctaccaaggcggaggcagtgcttctgcccaccctccctggggtcaggcacccccttccccagtggggtttcctaggtctgctgttggaaggtagcatgaacctactggcttaaaacagtgcaggtgtggccgggtgcagtagctcacgcctgtaatcccagcactttgggaggccagggtgggcgggtcacaaggtcaggagtttgagaccagcctggccaacatggtgaaaccccatctctaccaaaattagccgggtgtggtggcacgcacctgtaatcccagttactcaggaggctgaggcaggagaattgcttgaacctgggagacggaggttgcagtgaactgagattgcatcattgcactccagcttgggtgacatagcgagactccatctaaaaacaaaaacaaaaaacagtacaggtttattatctgtggtcctgtaggtcagaagtccaaaatgagtttcactgggctgaagtcagggtgtcatcctggagcgttccttctgggggattcaagggataatccattccctggtcttttccagcttctaggggtcactggcaccccttagctcgtggccctccctctgtctgcggagccagccacatagcaccctcagacctctctctgactctgcttctgtcttcatatctccgcctctgtttttgttcccctcttctattttaagggcccctgtggctatactgagcctactcagatggtccaggatagtcttcccagctcacaatccttaaaatccttcttaacctcttcacgtcccttttgccctgtgattctgggaattagaacatgggcctctttgggcatgtgtgtgttggtgggggcgtaatttgccttccacaccaggatctgtccccgctgcaacaggggatgttattcaagtaattattcagttaccttctgtcttccttggtagatgtactcgggagaggagacgttttctgtcttgtgaactgtcgtttgccaagcacccggcctggcacagcgttcaggtgttccgtgtccccttctcctttccctctccccatctcacccctggtctgggtgtgggggtgcagctgtgagtagcacagacaggacccctgccccgtggcgtggacattcttgttggggccgggtcaaagagacagtcaacaggtgaactctgtcctgcgtctagcggtgctaagtcaacaccaagaagaaaaagaaagggggtggcggtgaggcagcattaggtgctgatttaactaaggcacgtggatactcggggggcccgctcagaggaggcctgggtgggcagcccacgcgagcagctgcaggacctccccctcgccctccccaggtgggctacgaactgaaggatgagatcgagcgcaaattcgacaagtggcaggagccgccgcctgtgaagcaggtgaagccgctgcctgcgcccctggatggacagcggaagaagcgaggcggccgcaggtgaggggccctgggggtccggtaggcatgggggtcatggaggggagaagccggcgtcctcctcccagccgactccctggcgccgcccacccacccgtccccaggtaccgcaagatgaaggagcggctggggctgacggagatccggaagcaggccaaccgtatgagcttcggagaggtcagactcccagagcgccctcctcaaccccacagccagccagccgccaccgccctctgcctcctgccaccgcccctcctctcgtcctgtggccctggctcatgtctagggcgctgccccagcctccccccccccggcctctattctcgtttccatccgttcagccccaaagcgaccctcgcgacccttggagcctgtgtctccgctgcttagagcccccgcggcttcccatcgccccgggctccttggccggttcctccctgcccagaggctccttagtgccctgctgcacggccgccccgtccctgggccccgccagtctcctctgttatcccagcgtcatccccttggtcctgcaggaccgaactcagaggccacctcatcctattaaacctgttctggttcctgacatcccccgacccacacgagtaaggaaggaatggcctcccaactctgagctcacagagcagtgctgggaccgggcccctctcaggctccccagcatcccccgcgtgtgtgggcccccaggcctcagccgggccgagtgggtaccggagcaggtgcccgtgggaccggccggctggtgaccgctgggcttcgggctggtggagggggtgcctcggtggctggagggcagggcctggtcgctgaactgcagggcgcctcctctcccccctagatcgaggaggacgcctaccaggaggacctgggattcagcctgggccacctgggcaagtcgggcagtgggcgtgtgcggcagacacaggtaaacgaggccaccaaggccaggatctccaagacgctgcaggtatgggccagacccaggtggggctggggaccgagggacacaaggtggggggagcccagatcgcagcctccctgtcctccccacagcggaccctgcagaagcagagcgtcgtatatggcgggaagtccaccatccgcgaccgctcctcgggcacggcctccagcgtggccttcaccccactccaggtacctcccctgggccggctctgtccccagccctgagaccttggcaaggccccttgccctctgcccctgtgaagaaggccaggatgagtctcctcatggggctgttgtggagggtgtggtgacgaggtatgcagaggacgtagacagctcctggcacacaggaagaggttagcagagacgagagcccagcgctgagcagtcctcgtgagcacgcactgctttagaaccaggcccacagctgtgttcagggcacccagttcctctgtcgggctgtgagcgggtaacactgctcagcctccaggccctccagttcaaaacggccaggacggttaaggtaacctcaggaccccactcgagaaagttcccggctaggcgggcttggatgtcaagtgtgggtccaggccccagccagtcagcagtgagcagcgtggagcatggcagtcaccgcatcgtcggagcctcggtttaccatccacagagcagggcgagcctgcaccacggaggcgagacagcagcgagctcatctgcccagtcagcgggtgtctacgcagcacctgctgagttctgtcagtgttcccggctctggggatgaagcaacgaatgagagacaagtcttaccttcttggagccagtgggtggccgggcgcagacagctcagtaagatgtccagtgtaggagaaggcagaaatgccaggccgggcgcagacagctcagtaagatgtccagtgtaggagaaggcagaaatgccaggccgggcgcagacagctcagtaagatgtccagtgtaggagaaggcagaaatgccaggccgggcgcagacagctcagtaagatgtccagtgtaggagaaggcagaaatgccaggctgggcgcagacagctcagtaagatgtccagtgtaggagaaggcagaaatgccaggccgggcgcagacagctcagtaagatgcccagtgtagtagaaggcagaaatgccaggccgggcgcggtggctcacgcctgtaatcccagcactttgggaggccgaggcaggtggatcatgaggtcaggagatcgagaccatcctggctaacacggtgaaaccccgtctctactaaaaatacaaaaacttagccgggcgtggtggcgggcgcctgtagtcccagctacttgggaggctgaggcaggagaatggcgtgaacccgggaggcggagcttgcagtgagccgagatcgcgccactgcacttcagcctgggcgacagagccagactctgtctcaaaaaaaaaaaaaagaaggcagaaatgccagggaggggaggaggtggaaggtaggaggtgggacaggggaggctctcgtttcggagcagccagggagggcctctttgagaagatgaggccagtggctgtgcctttccaagcctcccctcctccatcatgaggtgctcaggactgaaaagaacgcacaggaagcacttggcactgggctcaccattagagcccaatgactgggtcctgttattatttttagagacgggggctcgctctgttgccttgaaaatatttaggaagtgccagccaggtgttggctcccattgctgccactatgatcgtcagtggtgttggtgtgatttgtgctaggacctcgggccagccatgtcccccagggactcagtttccttatgcagaaactgggcaggattggctgtcctcaagcattggttgtttttagcacccctgaggaacttcgtacaaatccaggcgccctggttcctccccaccctctccctctagacccactgagtcagaatctcccaagacagggcaactccagggacaggcaaactgtctcatgcccaccaaggcctgagtgccatggggaagggcctggggggctctgatgggtcacagttggggccttctcctcacctaacccatcatcctctctccctcacctgcccagggcctggagattgtgaacccacaggcggcagagaagaaggtggctgaggccaaccagaagtatttctccagcatggctgagttcctcaaggtcaagggcgagaagagtggccttatgtccacctgaatgactgcgtgtgtccaaggtggcttcccactgaagggacacagaggtccagtccttctgaagggctaggatcgggttctggcagggagaacctgccctgccactggccccattgctgggactgcccagggaggaggccttggaagagtccggcctggcctcccccaggaccgagatcaccgcccagtatgggctagagcaggtcttcatcatgccttgtcttttttaactgagaaaggagattttttgaaaagagtacaattaaaaggacattgtcaagatctgtccttggggagtgatcatttttcaaacagccggggcaactagaagaatcagagctgtggagctttgagaaaagagcttggccctcgggtccaagcggtgtctaggcccactcccttccccgttactttctcgtcatgggatcccagaaggaaaaagccctctccaaccccctggagagccgcagtcactttgatagcaaatgatgtggctgccaacagccgcagatctcagcgcaggccgaccgggattgctgtccacctcaggccagcctcctcacctttccaagcctccacacctacgcccaggtgcccaggactggaaagaatgcacagaaagcacttagcatgggacttgccatcagcgccctataaccaggtcctgttatgattgggttttttagagacggggtctctgttgcccaggttggagtacagtgatgcgatgaagctcactaaagcctcaaactcctgggctgggattacaggcatgaaccagcacagctggcctcctggttaatttaaattttttttttttttctgaggtggagtctcgctctgttgcccaggctagagtacagtggtgcaatcttggctcactgcaacctctacctcccgggttcaagcaattctcctgcctcagcctcctgagtagctgggattacaggcatgtgccaccatgtcccgctaatttttatagtttttagtagagacagggtttcgccatgttggtcaggctgttctcgaactcctgacctcatgatatgcccacctcagcctcccaaagtgccaggattacaggtgtgagccaccaccccagccccatttttaaattgtttatagacagggtcgtgctctattacccaggctgggcttgaactcctgtgctcaagtgagctttccacctcagcctccctaagtgttgagattacaggcttgagccgctgtgtctggcctcttattattattattatttttttttttgagacagaatctcactctgttgcccaggctggagtgcagtgggatgatcctggctcatggcaacctccacctcccgggtccaggtgattctcctgcctcagtctcctgagtagctgggattacaggcgcccatgggttttgtttgtttgtttgtttgtttgtttgtttgtttttcagacggagtcttgctctgtcacccaggctggagtgcaatgacatggtcttggctcactgcaaactccgcctcccaggttgaagtgattctcctgcctcagcctcccgaatagctgggattacaggcgcccgccaccacgcctggctaattttgtatttttagcagagacggggtttcaccatttgggccaggctggtcttgaattgctgaccttgtgatctgcccgcctcggcctcccaaagtgctgggattacgggtgtgacccaccgcgcccggccgagatggggttttaccatgttggccaggctggtctcgaactcctgacctcaactaatccgcctgcctcgtctcccaaagtgctgggattaccctgtgcctggcccagcctcttatttataaccagtgttgagggactgtgtggagccgggcacaggcgaagcaggcaggcttcctgccctggtaggacctggttgctataaaagtcctgccaggtgagcagaaggagcacacttcccctcccctgacctccagtcactgagtctcgggaaccggggctcggccaggagcgcctttacttggactgaggggaatgtggcctgcagacagtcaggagagtttccaggggacagcaggggctgtcctagcgggtggcatgaaaccgtctccctggagaggttaaggaagagcaactccaggggttccatttactatgtgctccggagctgggctacacggtggtactaaggaggcagcgctagtcacctgacctacaaggtcgggcttctgttagttacctaagagatgttaccaggacaagcagcagcctggtgggaagatgatgcctccaggtctctacctcctctctctctccctccttctctccacctcccctctctctccctccctctctccacctcccctctctctcttcctccctctccacctcccctctctctctccctccctctctccacctcccctctctctctccctccctctccacctcccctctctccacctcccctcactccaccttccctctctccacctcccctccctctctccaccttcccctctctccctccctccctctctccaccttccctctctcctcccctctccccctccctccctctctccaccttccctctctccacctcccctctccccctccctccctctctccacctcccctctccctccctctctctcctcccctctccctccctccacctcccctccctctctccacctcccctccctctctccctccctccctccctctctccaccttccctctccctccctccaccttccctctccctccctccaccttccctctccctccctctccaccttccctctctcctcccctctccctccctctctccacctcccctctctccctccctccctccctctctccaccttccctctctccctccctctctccaccttccctctctctctctccctccctctctccagctcatgctatctgggtctccctctgactttctaggtcctgtctgagattttgctctttctgttcccctctctgggcctccccgtcaccactctgtgtatctctggatccctgtccttcaacccagagctctgtctctggacctcagtggcaatctctaaatctctctccttcctcaagtcaaaaagtcgacacactcaggaggttcccttgagtggctgaactaccccaggttgtataactcaagtctgttttctcaatgttatccctgaccctctgggtcaaccctgtttgaaaatgacaacctttgctgatctctacatactggtctgccagggaaggacccgtggtccacaaccctgttcagaatcccccatctcccttggccaaaatatccggcatctaccaatggggctgtggcatgagggtgtcaatctcaggaaaggaatcttgagtcgcctgggcctgcagccctcgtactttcagaacagaggttctcagaatttaatgcgcttcagaattacactgaggacttgttaaaacatagttgctgggcccagagtttctgattcagtctagggtggggctcaaaaatgtgcctttcaaacaagttcccaggtgatgggtacgtgcctgacccaaggccacatttcagaagcactgctctagaaaagaagactctgtaagcggctcttacgctgggcgcggtggctcacgcctgtaatcccagctacttgggaggctgaggtgggagaatggcttgaacctgggaggcagaggttgcagtgagccgagatggcgcccctgcactccagcctgggtgagagagacactggctcccacctcaagatcgttttagttggtccagtgtaagcctgggtatctggacttttttattttttatttttattttttgagacggcgtcttgctctgtcacccaggctggagtgcaatggcgcaatctcgggtcactgcaacctctgcctcccaggttcaagtgattctcccgcctcagcctcccgagtagctgggattacaggcacatgccaccatgcccagctaatttttgtatttttagtagagacggggtttcaccatgttggccaggctggttttgaactccctacctcaggtgatccgcccacctcggcctctgagagtgctgggattacaggtgcaatggcgcaatctaggctcactgcagcctctgcctcccgggttcaagtgattctcccggcccggcctggcctctaatttaaaaaaaattttttttttttaaagttcctcaggtaggccaggcgcagtggctcacgcctgtaatcccagcactttgggagactgaggcgagcggatcacctgaggtcaggagttcgacaccagcctggccaacatggtgaaaccccgtctctactaaaaatacaaaaattagtcgggcgtggtggcgggcgcctgtaatcccagctactcgggaggctgaggcgggagaatcacttgaaccccgggaggcagaggctgcagtgagcctagattgtgccactgctctccagcctgggggacaagagcaagtcttcgtctcaacaacaacaacaataacaacaagttcctcaggtgactctgatgtgcagccaagttggaaagtcatcgctagatccgcggtgtgcaaagtgaactgcggaccgtggactgcggcacttgttagaaaagcagaatttgcattttaacacattcctaggtgattccggagatgtctgagaagcgatactttgtccaggggccacagtttgaatagcaaagctctagaacaataactctaggcttcattcccgttgtctgtgtgtgggcctacgaatatgcattttcgcaagcattcctcctcccccttgcctcagaccattctgatgcgggtggtgctgaacggctccatcctccttcacgttcacctctccctgggatttatcttactttccaccacctagacaggaaggggcgaatctggcttcccatctcggttgtgtgaccctgggcaaatgcctcccagttcgtggaagtctcagtgtctagttaagttttcaatcacaagtcattcctcacattcattcatctattcctttgacaaatggttactgactacttcctgcgtgctaagtgctggagatgcaaaatccagacagggaaaccgaataattacgaaaatgacggtagacgtacaaaaataaatcctaacgaacaaggcgcgcaggagcgctccgcccgggagggaggtcagggaagttttctctccaagaagacaacagagctgagacctgaaacgagcaggcattagggagccacccgtctcctctgtaccttctgcagcgtcctcaacacactaaggaagcggagacgcagaggagaatgactgtcccaccatctggtcgcctaaccaggcaggggcaggacaaaaactccatgcctcacgcttcccaaccaattctgctatgcacggtgccagagacttaaagcagtgtctctggtccctttcttctttcactcagcaaataatgaatttcagagatgtgccaacatagaggcacttggagaaagacgaggcagctgagagggaagctgcttacctggccgggacgcaacggttgcgaccaagtcccacttctgccagctacatacaccctctttcacacgctctacgagcagctaccgcccactcgccacgctattggtccaactagcatgaatgataacttttagggccaacgaagaaaaaggggtggactttcttgcccagctcctcccacttggccctgtggctgttttgattggcagatgacttcggctcggcccccgctttaaaggcacctgtctgtctcccattaggtacgcggcccctaacgcccacactccatgccttcctccgctttccccacccacttccaggaccaaccaatgacttcaaggcagaatatgcccccgcaaccaattaaaaagagctctaaacttgacggacgacttcccgcccctggactgtcgtagctcctcccccagaccaattgttttaagagaggggggcggatacatccaatcagcacgacacaggtctcttgattgacgttcgggtcctcgcgctggcgtgttgtgccctgaggcgggaggaggaggaggagcggggaggaaaacctgagccaatcctagcagcctgcgcgggaggccaatcgaacgccgcgccttggagcgatcacccaatccgcgaaagggggcagggcgcatccctgccaggaaccaatagaaagcctccaagggtcaggagcgacgttcagcgggagcaatgactggcctatattcgggactcgggggcgggtcggcgccagagacgagaagagaggaggggaggcctcctccgccgccgccatcttggaccgggcccggtcagcttccgcggagccatcggcagacgccgcggcctcccttgagccccgacccccgtcgtcagaacaaccccgggcccactcccccaaccccacttccgcttcgcgccgctatcgcgatagcgcccgggcccggggcgcgagaaaaaggcggcgggcgctcgcctcccccgcctgtcgcgatacgctcctcagcggcggcgccagctcctgtggtgagagcgtcaggctcgactgggccggaccccttcccttcctccccccggcgccatcggccgccctccccgccgcctcccgccctggcgacaccgccgtctgtcgcgacatggcctcccctcgcctgccccctgccgccgcctctgcagcgcggggctcccggcggggggcggctccctccctctcgccctcccgttcctgcgcctctttcacgttcctcagcgcctcccgggggtccttccgcgacccggaccccgggccccgcccgccgccgcctccccgcgtggcatcgcgtcgggccccccggtaggggtgtgagggtgcgaagcctcccgggcgcgaggtgcccgcccctctccgcgtcggtattggctcctggctggaaggatggaggcgcccctggtcccaggtgcccgccctctcggggctcaggtgcctgcccccctcggcctcggtccttcgcgttgtggggcagcctccgcgccggggcttctccctcgacggtggcggggagggggggtggtggtcgggacgaggaccccagctgggtgggggagtcacccttcccaggaccgaggccgccctccgcatccctcctcactgctcccgggagcgcagcctcccctggatctcaggttccagctgcccgtctgtatcggatgggagcctcttgggagaggagtggaggagaaactccccgttagttggagcctttgccgaagtttccacctctgtagtctgcagctcttccctctcatagcgagtagcgccctgggtggctccagcctcgccatcccgctgcactgggcgcctgcctttttgggggagtttggctttcccccacctggggtacaggaccgtcctcagtgtggcccacgtctggtctcagctctcacacttctttgatcctggcgtctgcccctggctttgcagccttgaactcccctgcatcgtgactctccgaccttctgggtgtgggcgtctcccagtgatatcaggaccactgtggtcttgttgctgggggctgctgggatcccctggcgctcaggtgcctggtgaaagacactaagccgccacgctgtccatgttagtgagctcccactgcgggcagcaccagcccctctttctgagcagtccctgcctctcagtgcagggcggccacccaccccggggtgagctctcctgtccttttggtgaggggttttgatgtctcccctccctcccttcacccctgcctgagtatgaggcttcttccatcttcacaccagtctcctcctttagggtgtcagctctccaaggaccaagaagcccactgcccttgatatttgcatcagatcccacactgtgggtttgttgacttcccatctacccttacgctgggtgtcagcagttggagaacaagggtttcgccttctggccccgctgctggtaccccatgagagtaggaagcttcctagacccgggttcctgtactgcgaggtgggggctcttccctctggggctgtgccttctctccagggtaaggaccctttcttggtgtcacctcccccagggataaggttcttgccatccttggtattggtatggctgcttttctggatttgaggtgtccacgcctctgcatgtgtccccaccgtaaggctgaggacccctctcggatgcaggtgcccccggctaatgcttccaaaaccccctcttgatttgtcactgtatggggtaaggcatagtttcctggctgtgtggatgtaagatacctgagtctcaagcgggagactccactgtagaccctgtccctgggaccagagacttctctggtgtagactttccaaggtgggagattccagccccccacccttggcatggggcatctcagtggagatgactacctctaccccaggccctaacgcatccttcttctggagtctcagagcctctgtgtggccacgtcagcagccacctgggttaaggatcacccttcaacatcacttctcagagctccttgctgcagaggcggaagctctcccagatcaaaggtgcctcatgacaaagaccactctgtgggcacatgacggcccccaaggttaaggaccacccggtgttagtttcccagggctgacctcctgcccctccctcctcgagtctttgtgtggtggtatcatcttccctgagatgaagtctggggggctcttctttactggttttggctctgattttagcgtgttggctcctgtgaggctggtgtcctgctcacctccccccaccccgccacccgccttgtgggtcccttccctgtggggatgtgtgttcctcttgggtaagtctcctcctgggccgaggttcccagattcctcagtgctcttggagagcctttgctgctggagcacaggttcttcacgcctgagagtggacctgcgatcaccaccttccttggaggatcttggtggatgcccccctgactacagcaaatggggctctttcttctctggcggcgtctctgcttcgagactcaggctccagcttcccttctctctggtcctttgctggggggaccagaggtacagataccctcatgatatagggattttcttagcggggaaggtgttgtctctactgtggctaaggctccagcctctctaggggacaagtaccctgggcctctggcacttgccccttctctgtggaggagctgcctcctcactgggtctcagctgtagccgacttcgatgtcacactgttctgtctgaaacatcacctccctgggttagcgctcttgttcccctcctcctggcttgtgacccctccaggacttccttctcttgctgccacagtgtggtctcctgtctgtgggtattcttcctctgcactaggataccagtcctttccgtgtggagacacagggagggcgtcacctgcctaaggtgttgattgccttgtttaggggtgtagaccatgagacctcttctctctctgggctggagcacctgcccatgaccctctgttgggttcttgggatggaaagagggagtgtaaactctcgtttcacattcttgttccccctatgcagtaagaggcttttctgtgttggggtgttggactttggtgaggatccctgcacacctgagctctggtgtccaggcccttgccttgtgtgagctccctgggtcaaagaggctttcccctcctcagcctgaatccccactgtggcaccttctcctgggtccttttgttggttgctttgccttcttagagattccccaggtagggcgtgatagctgacctgggcgggggctgctgcggctttctttaggttgggccttttactgaggagatttaaattccctcaagtgtaaggtagcacccctacctattatcacccagaatgggtccctgcggtgttgggaaaattctccctgggggtaaggtaccagccctgtcctttgtgggcttcttgttctaaagcatatccgtcccatatggttgctgctagtcacatgtggtgattagtaactagttaaaaatgaaaaattcagttcctccattacacttgccacatttcagatgttcagtggccaacagatatgcgcaaatagagtgtttccagcattgcaaagttctgttggatagcactgtttgccagatgttcccttctttgtgggtgaggactcttttggtgtgacttccctctgtattgaggctcttgttcctcagtatggggctgtttctgtctttacagtaagtgactactccagggttccctgccctgcacacgtagagtgggagcggcccgtggatcccagggaactgtgcttttcattgtaggccccctccctggaggggaagagggcaatctccgctggtatctcagaagtcttcttctgaggcataagcctctcttcccagggctcccctggtctcgctgtcaggccctaaggtatgtcttcccttggactaaagctccttggaactcccttttgacctcagtcttctctgggttccaggtaacttcctttaaaataaagacgctcctctcttgaagttttgggttcctgccctgatggtctatgtctccctgactctaaattaccaatccacttgctatgggattcctccgtgagtgcagatcggctccctcacagctgcggtacctttgcaccctcttatcttagtaagatttctgtcttctcccaggtctctcttgggtactgccttctgcccccaaatctctaagccttcttggtattagcttctttgggttaggagtgttatttccttttggtttaaggatcctgctctggaataaatgtcttggtggtttgagtcccttctacttggcattcagccctgtctgcatgagcgggttcagctcttcacagctttcggcatctctgctcgccgtcgttttcccccacccccaatctttcttctcctacctacagcttacacacacacacacacacgcccttctctgtgagctgccagtttcatttgtctcctgacttgtctgagggatgacctctcctagccacctctgcccagcccctctgagtaggaagtgtgatctccagggctaatgcctccatcccagtcatcagctgtgtgcagcatgactgtcctgctctgaaaaacctttttgagtgtattctggggagaaggtactccatgctctaggaattttccacttcctgagtcagaggcacacaaaaaagtatgtaacttttcttgtttcaacaaacttatggggtcccctgttggccagacactatgctgggcagtcaagcgagcatcaggagaactggggctggtctcttgtcagatagcaaatgcttcttctctttaccagtcccacctacctcactatgctgactaggtccatgtctctgggtttttaccagccagggaatacgtgttaattcctctccaatctctcctagcagcgtccgtctccaagagagtatgaagagagtgcgtctgtagggcagggaagatggcggacaagcgcaaactccaaggtactagactgacttcctgctgcacctgtagccacatgctccctcttctgaggactgctctttagatacctgccacctgggcaggattctcacagccttgttcctccctggccaggtgagattgatcgctgcctcaagaaggtgtccgagggcgtggagcagtttgaagatatttggcagaaggtacaggggctgagaccctaataatctgggtcttcagagaggagggcacaggaaggcggctcaggacctctgggtgttgaccagcgggaggggctacatatgcagatgctgaggacctaagagaatcagctctaagatggattgggggtaggggttggggggggtcctcgagtccctagcataaggaagaatcactggagtgggtactgggacatcccctcccacactgacttctcaattctctccatccctcagctccacaatgcagccaacgcgaaccagaaagaaaagtatgaggctgacctaaagaaggagattaagaagctacaagtgagggggctgggggcctggacgcctttgtcctgagggtagagggaactgggagagtggactgctgggtcccagggagaaggagctgtgggccccagttcctgggtcctgaggtctgactttcttgcttttcccatctgcagcggctgagggaccaaatcaagacatgggtagcgtccaacgagatcaaggacaagaggcagcttatagacaaccgcaagctcattgagacggtaggagcccagagcctgagtcccagagaggtgggaaggtcaccagattcttgagatcccaaggggcggaggcagagcggccagaccccagaggtcctcaagagaagtaaggtttctgcacctaagggaagtgaagaggcagcggactcagagctcagaaagtagggtcacgaggctcaggtcggagtgtctgctggcccttagtcagctcctttcccacctttgagagcccccctgccaactgcactctctacagcaaatggaacggttcaaagttgtggaacgagagaccaaaaccaaagcttacagcaaagagggcctgggcctggcccagaaggtagatcctgcccagaaggagaaggaagaggttggccagtggctcacggtgagttggggtagagaagaggaggtgaactctgaggatcctgagccctgggtgtaggcggaaccctagctgatgggcttcctcttcctctccctcccctagaataccatcgacacgctcaacatgcaggtggaccagtttgagagtgaagtggagtcactgtcagtgcagacacgcaagaagaagggcgacaaggatgtgagtgagggagacccgacacctttgggatggggatgggcatgggaatgggctggccagcaggaggccagtcatttatgctcctgggagttggggcctggattcctcaggcggacagggccaacagccgggattagggatttgagagacaggattgggagggcttagcagctgcacgcgtggggcaggaaggaggtcagacagaatctcagggtcccctgggtgtctgggtagaccgtggggcctttgtgaagaggagcgacttgggggaaggtgagtgcaggttgagcttgggccacagagtaaaagtgagacctgaaggacacccatggcaagaggcctcctggcacccagagggccctggtcctagggagagcacagtgggtagagacaaggcagaacatggagaaggcagagaaccaggcctgaaggaagacaggagtctgggacaaagctggatgttggggtcccaggttctaaaatccgggattgtggggtatgagttcaaagggatacaaactgtacagacttgctgaaaccagaaagacagggaggggagagccgggtcctcagggaagctgtgggtgggagagggtcaggaagtggaagatgacagggttgggtgtcagactctgaggggtttgggaaccaggggctttcggggagatgatgggtccttgaacagagcagagatttggaaccaaggctaagatgttaaatcctaaaggggccttgaggggagggcaggagcgaggcttaggaatctgggctctctcagggataaatgggtagggttgggggcctagtgatgacagatatcacaattctaaacagcaagctcctcacaaatgggggttatcattgttactgctggagcaggtcggagggtatctgtatgccagaggcagtcacagtggtgggcgggctcagttgagaaatctgggctgtcaggtgaggtgcagatggaggccaagtcgtgggatggcacaaggacctctgggtcttttagaggtttccaaggactcctggagccagaaaggtgtggggagaggagggagcagtgggatcccaagatgtcaaggctaagattggtccccacagggctcagagggtgggtggaccccatactgccccaccccgaaggggatggcgtggaggctttgggtctccacaggggtcagggactgaggacaggttctgtgggggcaggaggggccaagcaggtgctctgcagcccctgagcctggccctgggctcgccagcagaagcaggaccggattgagggcttgaagcggcacatcgagaagcaccgctaccacgtgcgcatgctagagaccatcctgcgcatgctggacaatgactccatcctcgttgacgccatccgcaagatcaaggacgacgttgagtactatgttgactcatcccaggaccccgacttcgaggagaacgagtttctctacgatgacctggacctcgaggacattcgtgaggccctggggctgatcgtggcacaggaagtgagggcccagaatgggctgtgtgagccagctaagcatgcccttcttctgcccccacagcacaggcgctggtcgccacctccccccccagccacagccacatggaggatgagatcttcaaccagtccagcagcacgcccacctcaaccacctccagctctcccatcccgcccagcccagccaactgtaccacggtgaggccccacgggacactagtaccttgtgtttccagcagggcaggactcgaggagacaaatctgggtcactccaaagtggctatgggagcgtaattgaggaaacacagatctaggtatccagggtctaggctcttggagcacacgctaaggtcctatatctgggtccctaaaggacataaagagcaatagggtgcatcccgcgccagtttaggtcctggatctgggaagtgggaggggccggtgcctgggctgcctgaggaggctgggtagctggccaccttgggcagggatccaagggttggcttccctgtggagagcaggttcccagatccttaagaggctggtgggtcagtgctggctcccagaaaacaagaagactggagagcctgaattgagatggtttctccaggcagattaaggacagccatttgaccagctctggggccgcaatggcagtcaattgggcccaggtccccggggcattcagagattggcggttctccatcagagccccagaggtcacacaggtttctattctgcctcccctacctcaggaaaactctgaagatgataagaagaggggacgttccacagacagtgaagtcagccaggtgggtgtgagcctggaccgggtgggcacgccattcactcctctgttgcttcccaaaggcatcttgaggcctgagcgccggccactgtgctgggctggtggacacaggtggctcagaaatcagtgctgccctgagggcaggtgggcagggcaagtggacaggtgactggtgctgtggtcaagggggtagcacacaggtcacccttggcctggccaggcagtcaggagatgctgctgtggagtgccctgggcttcacagtcaggtgagtttgcctggcagggagaggtggcagccagtaacatgggcaagttgtgacagaaagtttggaagtgaggagagatgagtctggccaggtctgcagggccaggggcccaactgtgagcacagggactgggactgtcaggctgaggggctcaggctttgtggacctgagtggcctccagagtccaataagcctaggaagcgatggggcctttgctgtgctgataatacacactgcaaatttctgagaggagacggtggcgggcagtgcttcttcaactcctttgacatctcccaggacaggagcacgctttcggaaacgctgctacagaacaatgttaggcaggagcagcatgggcctgaggcccctctgtgggctaacgggatggatggttccaaggggacaccctgagtgggcattgaggaggctggtgtggagactaaggggacccgcaggtagtagtgagggcgggcaacagggccaggaggtgatgaggagagacactgaggcaggtactccaggggccaggctgggctctgccaccttcccaggcccccactgccaagcagcgatgcccaggagagaagtgggtagtcagtcctgttgggcgcttggtaagcgcaaggtgcctgtggggtggctggaaagaagcccaggaggtggttaggctcagcagcccgagtgctgtccgcagattgcctgcggtagggataccatgagcacatttaccctcccaccactttctggagtgctggtaacttccagccctgtgagtagcttctgtgacccttcaggtgacattcagaattactatccaatttccagctgtttttccttctactcttggacattaggcggctccagctaatctcatattgagaacacttaagtgtttcccactagtcctctggcttccaacagatggatcttctctggctgacaacctaagttgtgtgtcagatccctgtgggggtgtccatggggcggtgtccaggcaggacttgggaagctgggcaggctggaaatcagtgtgagtgttttaagcatgaaggtgattgaagccatgagggtgagtaaggtcacccaggtccccaagagggcaggagcaggtgggggcagcgaggccagagaggaggctgctgggacaaagatggagcctgaggtgggggtggtgagggagaccagctggcccactgggtcctgaccctctgctctctcccacccgcagtctccagccaaaaacggctccaagcctgtccacagcaaccagcaccctcagtccccagctgtgccgcccacctacccctccggccccccgcctgctgcctctgccttgagcaccactcctggcaacaatggggtccccgcccccgcagcacccccaagtgccctgggccccaaggccagtccagctcccagccacaactcgggcacccctgctccctatgcccaggctgtggccccaccagctcccagtgggcccagcacgacccagccccggccccccagcgtccagcctagcggaggcggaggcggcggcagcggaggcggagggagcagcagcagtagtaacagcagtgccggtggaggggctggcaagcagaatggcgccaccagtgagtgaggaggcagcggggtggggggcgtgggcggggctgggcagcaggcagcagccctttccatttactctttgttcccaggttacagctcagttgtggcagacagcccggcagaggtggctttgagcagcagtgggggcaacaatgccagcagccaggccttgggccccccttccggcccccacaacccacctcccagcacctcgtgagtgtctcggccatcggcagggttgggatggcagccttttgaaacagagaggcgcaggcgcctcacccccgcatcggtgggttctgaaccccccgcccttgctgctgggaatggccaagcgctatcctccatctccctcgggtgttacacccccacttctttccagcaaggaaactacatcagcctccctgctttgcccttcagaacattctaaaatacgttctcatctaagtggaagttttctcaagagccccataccctttcctccccatttctgttacctgcctgaggccaattgactgccaccggagggtcactgtttcacttttcaaagtgaattgtcccgaagtccttattcctctgcagccactccttcaaatcttagctcagaccattccactgggtctgcctgtttcccgaagaatgccctaagaaagatcagtgtgcacaaaggaaaggcctgcttcctgccccctcaccccagctccagctggcctgcccaagggggagtgggccctgtgaacacctgcccagggcaagtggttttgatcagcctgtggcctggtggagcacccgagaatcctcacccccacccccacagctctgctctgctgatgagaaaccattccaaagattgggctctgcctttgtttgcccagagaaccacttctttctcccatctgtctgccctcacctgcccctctcagatcccatctgatctgtgcagtctcccctctctccagccaggcctctctgcccatcccaccctcagggaccctcctctcaaccccctcttccatgctctctctccaggaaggaacccagtgcggcagccccaacgggggctgggggcgtggccccaggctcagggaacaactcagggggacccagcctcctggtgccactgcctgtgaatcctcccagctccccaacgcccagcttcagtgatgccaaggcagccggtgccctgctcaatgggcctccacagttcagcaccgccccagaaatcaaggtgggctcctcggacatcccccgagcctctgtgtcctgactctgttgtttctttcctccaggtctctagctgcaccccttgcccccaccctctttctggatctctctctggctttctgtccccttctcacacttgctctttctccaggtctttctgtaccaccctccccgtgaccttgatctctgggggctctcatacctcctctcttgttccctccaaagctctgtttctctgggtctcttttcctttctcttggttgcacttgttgcttgctctctctgggtctccatcttcatcccccccgcaggccctcagtttctgtccccgtttgtcctcacaaggcatagactggtgtactttctgcacaagtagaaagactggttgggtgaatgcagcctggttccaccctttaggaagcttccctgctggggcagctgcagggaaggttgcggtgggcccaccgaggggcatctgacctgacctgggagacaggcccaggaaggtctgagagggggtgatgtttaagctgagacctggaccaggcaggggggctaacagctgcaggaagggcttcaggaggtgctttaggaggagcatgcatctgcctgtgtgcttaggaagctgggcaggatgcagcagagaggagagaggtgtccactctgcaggagacagtgccaccagctgcagggctgagatagtgggtgtagcaggataggacggtggggtcctgatcatcgagggtcaggagctggggcttggcttgtgagccagtatactgtagcgcagcttccatggggggaccagtgtgtatgcccaggctgtccaggaggcagtgtgcgcgcccaggctgtccaggaggcagtgtgcgcgcccaggctgtccaggtccaagtcttggcattgtcctttctgtgccttcatctgggaaacggcaatagtcacgattatacctactatgtagggttatttggaagactaaatcatcctcataaagctcttggaacagtttctggcccaacagaagcattaattttttttttttttcttttttgagacagagtcttgctctgtcacccaggctggagtgcagtggtgcaatctcagctgaatgcaacatccgcctcctgggttcaagcgattctcctgccgcagcctactgagtagctgggattacaggcgcctgccaccacgccaggctaatttttatatttttaatagagatggggttttgccatgttggtcaggcaggtcttgaactccgaacctcaggtgatccacccaccttgacctcccaaagtgctgggattacaggtgtgagccaccgtgcccggcccaaattttagaagtaggtggacaggatatttatagtgcgtgcatttttctggaaaaagggaaacagcagctttgagattttcagaaggggtccatatcttttaacaccaccaacaacaaaaatgaatcgctggggtgggtggtcgggaaccatggcaaggtttggagtagagaaggaacaacatgacttcattggaaaggtcccctggggctggtgaggacaggatagagggagggtggtctgggcaggagaggacaggcctgggctgtgtgggacatggtggcacgacagggaagggagccatccagtggggtttagaagcaggacggatagctgggcgtggtggctcacacctgtaatcccagctcttagggaggcagaggcgggaggatagcttgagcccaggagtttgagacctgcctgggcgatatagcgagacaggatggataagccttggcgactgactcgttgtggagagtccagcacagggctggggtttgggacagctgcacgtggctggaggagatgggaggaaccagccctgactttggggaacagaagcctgctgtaacctttgtaataggaaacgaggctgtggctgcggggctggagacccaacctacctgtttccagcaaggagactgaagcctagccgggctgggcccaccccgattccagtcaccccatgccagtcacaggcagacagctgagcatgtagacctcctgcctccttcaagacaggcgggagctctcccagcgtgtaggtgtccctagtgaaggagcgtgtactattggcacatcctttgacaaaaatggtagcgcactgtacatattctgcaggttggcgtttacttctgtagtatgtcacgaacttgtattttgaaaatctcggcgtagtattccatgctgcagagtcccactcacgagacgttcctctgctgatgaatgcgtcgtggtctccgattgtttccctacagtttgatgcttttacctgtcatgggtagattgtggggagtgggtcgttggccctccacggcccccaaacagggcaggtgagagcatctggggcctgtgtcaggctgcacttgctcctgcagcccaagtgctcaggccaggcctcttgtttcctccccaggcccctgagcctctgagctccttgaagtccatggcggaacgggcagccatcagctctggcattgaggaccctgtgccaacgctgcacctgaccgagcgaggtgagggacccaggatggtggggaagcagcgggccaaagaggaggggctgcccctgacccatcctcaccactgagggggccggacccccaccctccccacagacatcatcctgagcagtacatcagcacctccggcctcagcccagccgcccctgcagctgtcagaggtgaacataccgctgtcgctgggtgtctgtccactgggccctgtgcccctcaccaaggagcagctctatcagcaggccatggaagaggccgcctggcaccacatgcctcacccctctgactctgagcgtattcggtgaggggccacagggaagggggatggtctgggacttgagtcttacggaggaggcagtggctgaacctgtgaggctgtgggtagagcaccaggcccctgacttgggctctccactgaaggtcagcaccgccctgggtctttctgtaccacctccccccgcagggatgcatgtctgagcacccttttgatcacgacaggactagtaggcagctggcactgaccttcctgttgctctcacaggcagtacctcccccggaacccctgtccgacgcccccctaccaccaccagatgccacccccacactcggacactgtggaattctaccagcgcctgtcgaccgagacactcttcttcatcttctactatctggaggtacagcagggcccccggggcagcctcgggccccccggcttcgccgccaccgccgccgtcccccctcgggctggaggggtgaggtgggtgccccactgcggccactgggaccgcaccccctccctattcccactcctgggcccctgccccaaatccacctgtccccgtccccgccttccagcccagagatgttagaactgcttgggttgacagcgaggctggtccactgaggcacacctcagccccgcttccagttgcccactggctcacccgcggcccctccccagccctgctccagcagccccagtctaggccgaccccactctgctcattggcacattctcaggcctccctggagaccactggggagctgtccagccccctcccaaccccagtgagtcatgagtgacctccaccctcatccccacttgggaaattttctaaattgcctcctctctcagctctcatcacacattagtttttcttccttctcaaagcttctctgaaagcaattttcacctcctgtctcattttccttctcctgatcagcattggtatgttctgtgcccccagccccatctccaagaggattgtccagcccaactgtggtctgtggcgggggccggggttcagccctgatgtcctgccccattcccctggctccccacccagtttgggggccccctgatccccctctccactgttcctcccccagggcactaaggcacagtatctggcagccaaggccctaaagaagcagtcatggcgattccacaccaagtacatgatgtggttccagaggcacgaggagcccaagaccatcactgacgagtttgagcaggtgagggccccgccccctctcttcccgctgctagggttggggtagagtccccaggctccaggcagcccctgctggcctctgctcccttgcctccacctttcagctggcgcagtccctcagcctgaccaagtactcctccctctggctgtctgctcagcctggaacaccgccctctcatcctccacttggccagctcctaggcctcctgtaggtctcagcccaaatgtcccttcctcaaagaaaccttcctggagccacccagcccagtgcctcccctttgcagtgctgggcacactcgcctggggtgtgggattttcccagtatgtgtccctgcaccaggctgtgggctctgctgccgagggaccttgatggcccccacttcacctccaggtcccagcactcagcagggcaggggctcagtgcggaaactattttttttgaatgggcttctcaagttctaatactgggaaattcctgctgcttgcaaacactctggaaccaacctacctgggtttcagcccagtccagctgggcgactctaggcaagtcactcgaacctctgtgtctcaattaacttatctgtaaaaatggggggaagaccacctacctaatgcagttgttatgaagattaaatgagttaataacatgtaagtacttaatggtgactgctacatagtcagtgtcatggattttttttttcaaattactttcagttggtgtgttctacagtgatgtttttttccaccaaatacttccctgatgccgagccccttcatggggatgaagtagtacaaggtccttgtcctcagagaactcagtcccctctcctggttctcccaggttgccatctttgaagcacttaagacattcatttagaacctaggtcctctcccattgtgtcctcagatgttaaccacagacttcctgtcctttcctggtttggcccaaaaccatcctccaagttagtacatttcagggcatccagtcattcagaaattcccacaccacttcgtcaccaataaaatgtccctgcagagtgcttggatttagactctgagactgttccattctctagaacaagggtgacagtacccactgcctcgaggtctttgtgaagattaaatgctaggctgtgcatcctgtactcacgtgagaggtgctcaaaagccacagccctcgaggaaacgaaggctgtgcactcacacctggggctggggccccgttctggcagctggcttcggtggaacctctgcggccccctccgtttcctcctcgctgaagtggcatgataacatttcctacccaagaagaaccttgtgaggatggatgagagtgtgtgcgtgcagggcagctggcccggtgcctgacacatccacagccctaagaattgtcccctttgtctgttggtccggcccagatcccagaccacctcctcgtccactcactgaccgccttctcccccggccagggcacctacatctactttgactacgagaagtggggccagcggaagaaggaaggcttcacctttgagtaccgctacctggaggaccgggacctccagtgacaccggcccctccctctacccacccccttcccccgcatgctgatccccctgcccaggtgagggccctgccctggaagactggagggaggccccaagccacggggcatccccctctcccaggaagcagggagggggccgggaggttttcctctcagccccaccctgggggcccgggggcgagggctgccccctcctcccctccccagtgagggacattttttggtaaacctattttcattttggaaaatatttatgaataaatagttttatatgacggctggcagcagcggcctctcctgtaccccctcaggagtcagtgagtaaggtgagggtcctgctggcgggggcgccgggccagctgggggttgaattgggagttgtaccgccgccgccggtcatccgtctcgtcttcttccggctgaccctcctgtagtgcccggccttggacccgggccagcagggcctctgcccgagacctctcagctgcttccctccgcagacgttcagctcgaagctggtccagggatggaggcctgtggggagaggagtgaggtcagaaagctggtagcccctaggaggccattcccccaacctctcccatagagggagctgccgcctggaagccccgctgcatccagcacaccccagcctcagctccttaggcctgctggaagcagccacttggtgctgggacgccatgggcacgtctctggccttcccttctgtgggctttggtcctccccagtctttaaaatctgatgcttctccaggtcaagaaagcacacttagcagccccctggccctcagtttccctttctagaggaaagaagactacaggcagtgtaccccctctagaccaggggtgcagcatcctggagacagaagcctgcttttactctctaacccagcagctctcaaactctttggtctcaggacccctttatactcttaaaaaccaaggaccccaagagcttttgtttaaatgggttctcttaatatgctgcaaatcattagtgaaaactaagaaagtttggacacaagcatctgccattggccatcagagtgagggtgtctccccatcacacagcctctggaaacctgcactacatgcctgagaacacgagtggaaaagtccaccagtgtcaggaaaataggcttgacaccacagcaccccgggaaagggtgtcaggacccctagggctccctggaccacatgctgagaaccacttctccacctagccagcccttcacggagtccctggctgtcctgaccagagacgctgcagtgcccatgctgggctgctgccaagccctgaaggtctgggccctggtctgccgaggtggggtcttcttactccttgggtcgctgcttctcagacccctccttttcctttctgctgcgactgccttcatcaccgccgtgctgtctcttcttccccagatgcttctgcatctcccgcagagggtccagacggctcttgatcttctcatctggggctgggccgggcggggggccccctcgccctgggggtagctggtaccaagggggttgagtctgtgcctccgctgcactctggcccaggtatgtcaggatgcccagagctttctcttgcctctcctgagggggccaggaaatacaagagatgtgatataatctttcaaggtgtcaggtgtgtctccctgacacaggtatctaagcgaacaggtatctaaggcttgttatgaaccagttggaccaggtgctggggatggaagacaaacagaggcaaagctccccctggggggacagtagcaggtacagtaacagcaggggaaggaggggacaagtggagccacttgagtgttcagaggcaggcatctttgcagagagacttgaagagaagcctgaagggatcaagcaaagcagaggagcgatgggtggggtcagcaagtccagagacagcagataaatgacaagagctgatgtacctcttttttttgagatggagtctcgctctgttgcccagactcgagtgcagtggcacgatctcggctcactgcaacctctgcttcccaggttcaagcaatcctcctacctcagccccccgagtagctgggattacaggcacacaccaccatgcccagctaatttttgtatttttagtagagacggggttttgccatgtttggccaggctggtcttgaacttctgacctcaggtgatccacccacgttggcctcccaaagtgctgggattacaggcgtgagccaccatgcacagccactgatgtaccttttacacttgatcttagccaaaaagcaagaggcgattgattcactttttgtttgattgttttgagatggggtctcgctctgtcacccaggctggagtgcagtggcgcaatctcggcttactgcagcttccacctcctgggtcaagcgattctcctgcttcagcctccctgggattacaggcgcgcaccaccatgcccggctaattttttttgtatttttagagataccatgttgaccaggctggtcttgaactcctgacctcaggtgatccacccgcctcagcctcccaaggtggtgggattacaggcgtgagccacagccggctgatttaaatttttaaaagcccatcaggtttgagactcctccagtttggagaactgagcggtttgcccagcagctggggacctctagcatctacctccaacccctgtgggcgcccagacggcaatagccaacgctttttgagtgtcatgccttggtatggtcctaaattctgtgtgttcactcttgtttgaccttggtcacaaccaatggctaaagtgccccctccctccaactcgattcatggcccctctgatgaagtgggtgaggccagcttactttctcctgtcgcttttcttccttgtactctttattgcctctgatcactcctttcccttcctccagcagctcccgaaacaggtccacagggccagaacctggggctcccgcctctgctgcttcaagctcaggcagtgagttctgatgtctggctttcttccgtaggaattctgtacgggcctggggagaaagttataggcaggacattcagaacctagaggtaattcaagaactgtgagtctggtgcccaccacagaaaatggcagtccagggtgctggggttatgagaaagggagcactaggcgcctaaaagaggcacctgtcctagctgggggtgagggtaggcagatgaggcaacgcctgggttttgtaaactccctttcaaatagtaaaccacgggtcatcaaggatgtatgggaggaggtccctggcctaaaccaaaggggttcctaacctcaagtgagacaattaaaacagccataaaggtatgcattaggccagacgatctgaattctagccatggctccaagtgactaccccaagtctgctgaagccctgtcccctgccttcaggacgcggatttcaaacagcgctcagcagcctactgagattctaaaaacctagactacctcccacccacggcggaggatcagactagctaaggaaatgaaagttgggtgtacaccaaacagatttaaagagccatacggaaagcccgtgtttgtgtgtatgtgtctagggggcggtgcacgaaagggctcgcccgatggcgtggagcctggctgtccgcctctccttaaaatgtgccttcccctcactgaagccatctcacttcgtgcaacagagatgacagtgcccctctaagaacgaacagtgcttattggggattccgcaagtcaggtgcacggcatgtagttagcatacagtagatgctcaataaataggctgtgcaggcaaactaaaaagtgatccgaatttccttgaactgtccaagggttcacggattcattaaatgttaagcttctcttttgtgctagacactgttccagccatgtgaaatacatcagtgggggaaaaactaagacgagggcgagatcaaggaaggtttcgtggaagtgggcacaaggtttgcggggcaacgtcctcgaaagtgggatcggcgcctggtcccgaatttcacacggggcacattgagcctgcgcaacgcctccgcttccggcccccaaccgcggcgcctgcgcgctgggccccggagcgccgccctgccggcttccgagcttacctcttgctgagccagcagcaccctccgctcacgctccttctcctcctcccgggcctgggcctcgtcacgccgcacgcgggcgacattgtccttgttccggacgtgccagctcttcttgggcaagatattcatggcgtcgtagctgtccagggactggcacgcccgcctctttgcacttccgattggcgagaggatgcccccctttttcttgtccctacttcgaccgcggattggttccgaattagttggtacggccccctggcctgtagcgacaggtgattggctgagacgccctttatcacagcgaatgctaggcgttcggctcgtggtatcccctagcaaccgcctcttgtcacagatctgaaccaatcataagttggcccgcccctgatgctaccagatgcggccgtcgattggccgacatgaccgacaagtctccttgcggaagagcgctctgcaccgacaaacatgcccgtacatttgattggctcctgccccgctgtagccctgcccccaccttcaggacgcagatttcaaagcgcgctcagcaacctcggctgtatttattgatacaaggaagatcacccgagagtcagggacgtggcggcgaggggccctggaaatctccagataccaaagctggaagggcgtggagtcttctccagttctcctagtttacagatgttgtgacctaggcttacaatgggcctggggtctgaaagcgggacgtgggctgcgggggtcaaagagccggtttggtggaggtcagcgccacagcgcgccgtgccaggaagactttattctgcgcctcctggggcaaagagaggtggaggtgagacaatcctcttccccaacccctttccatgttccccaggggccctctcagggacccgcctggctcaccgtctctctctgacgtttgagctcagagatgaggcgtccgtaggagttagccagagccacagtgtacgccatcaggatgctgaaggagacaggaacggaagccactcctgacacgctcttccattatatccaaacgtctggctccttcgaagccagggatgtggacgcctaagcccctcctcgtctgggctcaaggagttcagtctcccagcccctccgccttcagatccaggagtcctacgtcccgcccacctcctccttcggacccagcagtccaggagcctaggcctcctccctcagactcagtacgttgcctgctcccacgcccaagcctctcctctcttggacgcaggtggtggcccccagatcacacgcattcaaacccagacccagaagtctgggccgtctcacctggagatcagcagaaggggcacagcaaaagcctgggtccccaggaagaagaggaaattctgggtggtctcagggaggctggaaatagactcagggatctgggcccagatggacgactgcccccggaatggaccacacagcttagaaggcgggatcctgaagtcaagacaggctgggctcacatagtgccaggagtctgaacactgaatggggagagagggagggagagaggcgggagcctctcgcacttacaggaagatgctgtaaagcaggggaacgctggagatggccagacccaggagaaggaccaaggggaaaaagaaattcgccgcggaggcccggaaggtgcgggcagccggggagcaggtggagaagagggtaagctggtgggggaaggcacggagaaaagggctctgaaacacaagagtctgtgcctccatttttttttttttttttttttgagacagagtctcgctctgtcgcccaggcttttttttttgagacagagtctcgctctgtcgcccaggctggagtgcagtggctctcactgcagcctcccctcccgggttcaagctattctcgtgtctcagcctcccgagtagctgggattacaggtgtgcaccaccactcccggctaatttgttttgctgttgttgttgtttgtttgttttctctttttgagacggagtctcgctctgtcgcccaggctggagtgcagtggcacgatcttggctcacttcgaccttcacctccctggttcaagcaattcccctgcctcagcctcctgagtagctgggattacaggcgcctgccactaagcccggctaattttttttgtatttttagtagagacggggttttgccatgttagccaggctggtctcaaactcctgacctcaggtgatccacccgccttagtctcccgaagtgctgggattacaggcgtgagccactgcacccggcctacctgcctctccttttttccgaaccaggagtctgagccccttcctcatctaggaccccggagtctgagtccccagatcctcagacatataagtcagaatgccctagacccctcctctcagatgcagtagtctgtcctccaaccccctcctctctcaggaccgagtaatccaggcccccaggatcttccttgcccttgacccaggagtgcgggccccaatacctcctgcctcagacccaagggtcccccctaccccttaccttcttcaggtagaaaagcagcaggaacttgaccgtgttaagcaggggcagtaaagggcagaaaaaactccccacccagaccaccgtctgcgcgtagatgagccccagcacctcgtcgggcacctggaactcttgggtccccgccagacgacccagcgccccaggacagaggccacagaggagcctgaaggacggggcggggccgggccggagtcaggggagtggcggcctggagtttccacgcctccaccgccccgcccgccaataggaagcatgcgtattggtggtggggggggggggggcgggactttcaggactccacgtggagggggtgtgtccagagggcgggtcctgaggactagaagggacccagatgtcgccgccgtcggggccagagggaagtaacccactaaaacaagggcggggagcggggagatctgcggacctagggcaagcaaagggagcaggcagaggcgggaatggtaaaaaggtgcgcggtgaaaagaacagcgcgatggggcacggcctcgtcctagaggggcggggccacagcaaggggcggggctctcactttctaggaaactggatgagcagcgcgactgccaagacagtcagcagatcaaagagcagaagtttgtacatttcctggcccaggacagtctcccagcactgaagaaggaagaaatatatcagaaagaactcgggacccgggcacctggaggcccacgcgtccgagtctccacatcgcaagcctatgagaccctgtcaatactttctctgggggtcctcgtttttcaaactttcatacccttgggagagtgttccagcaccccaagctcccctctccgcccaaaccaagagtctggacccacccagctccatctttccttcagggacccaagagtcccacgcacacccatgccgttctcaccggaagttgtttgtaattgtagccacaggttttgcagtcctcagcctcggagtcgcccccacaagtgatctgattccagagagagaagagcaggaccaccagggaggcgaggcgaagaaacacggtcctgaaggggggaaggcagagaatgggccctgacccggtacccaccatgtggcagttcccttctcagtggaacgcgcccgcattcaacccatctcacagatgaagctgaggcccagtgacagaatcaggatttctttctttctttctttcttttttttttttttttttttgagacagggtctcactctgtcacccggactggagtgcagtggcgcgatctcagctcactgcaacctccacctcccaggctcgagccattctcctgcctcagcctcccgagtagctgggactacagaagccactaccgccgggctaatattcgtatttttactacagacggggtttcatcatgtttgtcaggctggtctcgaactcctgacctcagcctcggcctcccaaagtgctgggattacaggtgtgagccactgcacctggccaacagagtcaggatttgaatccctggattcggtatcagcaggatttccgtgtcttacctgtcagcgccaacatccctctgaccgcccccacccttcatcattcccagccatccccgtgaggctggaacctgagcaggataaaaacgatctggcgactccgagtgtagccctccagtggagcaatgagcttgaacacgggcggcagcacaaaattgaccccagcgatgaagatggacggaaggtaattcaccccaagcttcagcagtggcaactcctggacaaggggcatctcctgggagcgggatggaccatgagtagaggcttggggtcctggaggagccaagcttaaggtcctccccccggcctcttcttcttcttcttctttttttttttttttgagacagagtctcgctctgttacccagcctagaatgcagcggtgcgatctcggctcgctgcaacctctgcctcccgggttcaagtgattctcctgcctcagcctcctgagtagctgggattacaggcgcccaccaccacgcccgtctaatttttgtatttttagtagagactgtttttcaccatgttggtcaggctggtctggaactcctgacatcgtgatccgcccgcctcagcctcccaaagtgctgggattacaggtgtaagccaccgcgcccagcctctctttttcctttaaaatccctaagtccagggtccgaacataccctctcccatacttcctctctaagatctctggcatcccaaacttccgtcccctccctccaccgttggaaatgtaggttccaggaccccctggcttcctcttccaagaccgtccgcacctgcagctccacggtgcaccccgtagcccagtagacgccatagaaggctgcccccaggagcgcgaccaccagcaggttgagcagcacccgcaccaaccaaaccctggcttgctggcccagcgtccgcaccgcagcctggcgccgcaccactgtctcctccagctccacctgaaggcaggagagatgcccgcttggactccatttcccaaggcgcgggcctcccggttccccaggtctggctctccagagatcctccttaacgtgaactgatgcagccgtctccccacccgctaacaacctctgcagtcctggttccacctgctccaggaaaccagcggccctttacagccccgccccttcgcggccggatccagcaacccaagcccccatccctccgcggtcaatctcagcaccccaggccccgcccctgaggctccgcccagcatcccaagacccgcccctggtcagccctgcccatcagaggctccgcccccaggtggccctgcgctttattcctggcctgaagttccagttcagctgtatcaagacgccctgctggccgctcccatcacttaactttgaaccaaattgccttaggccccgcccgcttcttgtgcttacttaaaaaaaaacaaactttttttttttttttttggtagagagggagcctccctatgttgcccaggctggtctcgaactcctagactgaagcgatccacctgtctcggtctcccaaagtgctggggttacaagcattagccaccgatcccagccctggcgcatccttttcctacacgcttggagctcgggcagccctatctcggcctcctctcaaccttctcattccccaggacctgcctttcttggagaaggagctgcttagcatctctccggaggccccatcaccgagttaggccctgtgcgttatctcagcccggtcctgtctggtccctacccagttgcagaccccgctccctaatcgcacctttaattcgtacaagatgatgcgctggcgcagccgcacgtggacgtccccgcagagaccgaagtcccaggccgagaacacccggtggctgtagctggtcagagcctcggactccgccagcagtgtctgcttcagcccagacaccgagctgagaggggagacccgggagacgggaagtgaaaggacagccaggaacgggggttatggggagacccctcatattgggacaaatggggaagatgaaccctaaggccttgggtactaggcgagttcccaccagaccagatggggaaagagtcaaagaggcggagacacagtcattgaaggcaaagtccaagggagattcagagacagttctggggtgcaggcaccccaaagagaggcagaaacctaggagacagggacagagcctcggagcgaagggggcagaaacccagagtgagagaaacagaggccctgaggaagacagagatgtggaggagggacagaggccccagagggagattcggagaaagggagaaaaagacagtgagaaaggggaaactacatctacaaaagatgggggtcaaagacccataagaagtacaggcacacagagaagggagctgcggcgggaagagccgagaagaagacagagacccagagaagatggcaggtaaagactcaagagagggggcaggccaggcgccatggctcacgcctgtaatcccagcactttgggaggccgaggggggaggatcacctgaggtcaggagtttgagaccagcctggccaatgtggtgaaaccccgtctctactaaaaatacaaaaattagccaggcgtggtggtgcatgcctgtaatcccaactacttgggaggctgaggtgggaggatcacttgaacccaggaggtggaggtcgcctccaaaaaaaaaaaaaaaaaaaaaaagacccagagaagacgggcaggtaaagagactcaagagaggggggcaaagacccaggaaggagatagagaaccccagcaggggcagaaacagaactggacaaagagaccatgtgcaccttcactgccctggccccggcccccatcatctctcatgtgaacaaccacagagggccctcacatggtctccttgcttccacttgtgcccgcatataatccattctcagttcttgagccagtgggaccttcttttgatgcaactcagaccgtattcccctgtttaagacctattccagggcttttcccttctcttaaaatcgaggctctttgccgggcgtggtggctcacgcctgtaatcccagcactttgggagaccgaggcgggtgcatcacctgaggtcaggagttcgagaccagcctgacaaacatggtgaaaccccatttctactaaaaatacaaaattagccgggcatggtggcacatgcctgtaatcccagctacttgggaggttgaggcaggaaaattgcttgaacccgggcggcggaggttgcagtgagctgagatcgcactactgcactctagcctgggtgacagagcgagactccgtctcaaaaaaaaaaaaaagttgacttttggccaggcacattggctcatgcctgtaattccagcaccttgggaggctgaggtgagcagatctcttgagcctaggagtttgagcgcagcctgggcaacatagcaagaccctgtctctataacattaaaaaaaaatttttagcaagacatggtggtgcacccctgtggtcccagctgctcccgaggctgaggtaggcggatcagttgagttccggaggcccaggcttccggtgagctatgattgcaccactgcacgctagccgggtgacagagtgagaccctgtctcaaaaaacaaaacagactgggtgcggtggctcacacctgtaatcccagcactttgggaggccgaggcaggtggatcacctgagatcaggagttcgagaccagcctggccaacatggcgataccccgtctctactaaaaatacaaaaaattagctgggcgtggtggccggagcctgtaaacccagctacttgggagggtgaggcagtagaatcgcttgaacccgggaggtggaggttgcagtgagccaagatcgtgccattgcactccagcctgggcgacagagtaagactctgtctcaaaaacaaacaaacaaaacaaatgaaaaacaaaaacaaatcccaaaaccttgatcttttttttttttttagatggagtttctctctgtcgcccaggctggagtgcagtggcgcaaactcggctcactgcaagctccacctcctgggccaccgctcctggcccaaaaccttgattttaactcacacagaataaagggttacacagcaagaccgaggattctggggccgggcgcggtggctcacgcctgtaatcccagcactgtgggaggccgaggcgggtggatcacgaggtcagcagttcaagaccagcctgaccaacatggtgaaaccccatctctactaaaaatacaaaaaagttagctgggcgtggtggcgggcgcctgtaatcccagcaacttgggaggctgaggcaggagaatcgcttgaaaccggaaggcggaggttgcagtgagccgagattgcgccactacactctagcctgggcaataagagcaaaactccgtctcaaaaaaaaaaagactgaggattcttggggagggggtttctgccaccaccacttgcttccccaccccaacccgtcccgtcaggggtcaggggtgcaggtgccactgaccgatgcaggatgagcaggaggcagatgaggccaacggcaaaggcccagcacaggtaggtgaccgccaggcgtgggcggggcgggtagaagccatagaagagaggggaccattccaggtaaccctgtggggggaaggcggcgcaggggccactgtgggaggaggcggggctcctggagctgcacagtcagggtctggggtcagggtttgaggttcgtgtcattgaaggcactggggtcacaggtgggcggggaatcccccagggacccaggcacctacctcacccgagagcaagttgaagagctgggtggcaaaggtgaccaggccctgggagtgggggttataggagccgcagggcgaggagatgtcggggccgggagggcctgggggagcgcctcccaaccaggtgggcagcagcgtcatgcaggccatgagcacagaggccagcacgttaagaaggagcaggaagcgcagcagggagaagtaggactccgtgccggcgccaaactggcctgcagggggcagcagagagaggctcaggttccttcccgggagcaggaccagcccctcctacccctggactggggtccagccgcgccttcctttctttctttcttttcttttctttcttttcttttcttttcttttcttttcttttcttttcttttcttttcttttcttttcttttcttttcttttcttttcttttcttttcttttctttctttcctttctttcttctttctttccttccttccttccttccttccttccttccttccttccttccttccttccttcttctttctctctctctctctctctctctatatatatatatatatttttttttttttcttttcttttcttttcttttttttttttgagacggagtttcgctctgccgcccagcatggagtgcagtggcgcgatctcggctcactgcaacctccgcctcctgggttcaagcaattctcctgtctcagcctcacgagtagctgggattacaggcgtgcgccaccatgctcagctagtttttgtatttttggtagagacgggggtttcaccatgttggtcaggctggtctcgaattcttgacctcaggtgatccacccacctcggcctcccaaactgttgggattacaggcgtgagccaccgcgccaggcccagccgtgcctttctcagacccaagagtccagacccccagcccctcctccctcagacccaaaaatccaggcccaagcccctcctccctcaaacccaggagtccgtccccagcccctcctccctcagacccaggagtccaggccctgcccccaggacaccacccaaaccccaccgcacccccgatcctcttcagtgtccacgcccagggctgcaggcttcgcaagccttcctttgttttctccttggacctccgaagtagccgcgcccatcggtccgtcttagttccagagccatagaccacctggtccctgctggcatttctttgcctgggagggaaacaggcagaaaatgaggggtttcgcagccccagactgggaaccatctgaatgtagacacaatccaacagtagaatggagaagtaaattgtggcctatacataagatagaatactctgtagcaataaaaaagaaaccagctgggtacagtggctcaggcctgtaatcccagcactttgggaggccgaggtgggtgaatcacctgaggtcaggagttcgagaccagcctgaccaacatggtgaaatcctgtctctactaaaaataccaaaaaaaaaaaaaaattagctgggcctggtggcgggtgcctgtaatcccagctacacgagaggctgaggcaggaaaattgcttgaacctgggaggtggaggttgcagtgagctgagatggcgccattgcattccagcctgggtgacggagtgagattccaagaaaggaaagaaagaaagaaaagaaagaaacctaatgctaggcagaagaagccagcacaaaagactgaagactgtatgattctatttgcacaacgttgcagagcacagcttgcaaagctctacagaaaagcaggaggctggagtgggaggatcgcttgagcccaggtgtcggaggctgcagtgagctgagactgcaccactgcactccagcctgggcatcagagcaagactctgtcaaaaaaaaaaaaaaaaaggttagggagaagaggttaccttgtatttgtgaggaaaaagggggtgtcaggggagggacgcacagggtgctgtcatgccgtgtcacttgccctagctggagtttatctgggctctcactttatgaatacagccatccctcagtatccatgggggttggttcaaggactccccaagaatactgaaatctgtagatgcccaaattccttatataaaacggtatagtatttgcatacaggctacacacatcctcctgtgtttgttttattttattttattttaatttttatctgatttttacagacaaatgtctcgttttgttgtccaggctggagtgcggtggtgcaatcatagctcaatgcagcctcaaacttccaggctcaagcaattctcccgcctcagcctcccaaagcgctggggctacaggtatgggccacgacacccagccctccaatgcactttaaatcacctctagattacttataacacccggtacaaggtaaatgttatatagatagctgttcttttaacttgtattattttttgtcatattgttactttgattattacttttaaaaaatagagatgggggtctcgctatgttactcaggccgcagtatagtggctatattcacaggcatgatcccactactgatcggtgtgggagtgttgatacattgttattttttattgttttttccatatatatacacatatatatacatatatatgtgtatatatatacacacatatgcatatatatacgcatatatatttgagatggagtcccgctctatcacccaggccggagtccaatggcacgatcttggctcactgcaacctctatctccctggttcaagcgattctcctgcttcagcctcccgagtagctgggattacaggcacccgccaccacacccagctaatgtttgtatttttagtagagttggggttttgccatgttggccaggctggtctcgaactcctgaccacaggtgatccactcgcctgggcctcccaaagtgctgggattacaggtgtgagccactgcaatgggcccataatcatttttgaaggagggcacctgcattttcattgttcaccaggccctgcaaattatgcagtgagaatgggaaaagaaagaagttaaagagagggaggcttggaagaggaggcaaagatgaaggaaggtataaagcagagagaaataaatattaacagattttggacacacacacagagagaaactgaggcagagacaggattggtggagaccagggagacggcaaatcccagagagaagagaccccagagccatcgaaaggcagcactcacctggagtccgaagtagagacaaagatgaggggaagaaagaaaccaagagaggcagctctgagcggggcagagagaggccccagaagccaggagcggcagaggacagagggaggagaccgagtccagggtatgggagaagggcccggtccgggctgtgcgggtcccagctggaggtggggcctcacctgtgtgcccgtctggcctgcatgggccagggcagttcccgggaagggtgagggtcctgcagctctgtctgggtgacttctgtgaaggcctttctgctccttcctccatcctcctcctcctcctccagcgccccccaaggcagcaccccagggtctcggtaccgaagggtggcagcactgggcagctcgttcagcacagaagacagcgatgggcctggggaggagcagggggctgggaagacccgggagtctgggccctaattcctcctccctcagaccaggaaaccaggtccccggcccctcctccctcagacccaggagtccaggcccccggctcctcctccctcagacccaggagtccaggcccccggctcctcctccctcagacccaggagtccaggcccccggctcctcctccctcagacccaggagtccaggcccccggctcctcctccctcagacccaggagtccaggcccccggctcctcctccctcagacccaggagtccaggcccccggctcctcctccctcagacccaggagaacaggcccccggcgcctcctccctcagacccaggagtccaggcccccggctcctcctccctcagacccaggagaacaggcccccggcccctcctccctcagacccaggagtccaggcccccggctcctcctccctcagacataggaatccaggcacccagcccctcctccctcagaccaggaaaccaggttcccagcccctcctccctcaggcccaggagtccgggtgccagcctctacttcccctggacccaggggtccacagccctcaactccatccccaagcgtggaaccctcctactccagggcagtggagtccaggctttaacttccttttccctctagctcaggagtgtgggaacccagcctctcctattcccaagacacccaaactcccagcccttagccctcccctcctcccagactagcctggttctccaggctcctcctcctcagaccctggagttccagcctccagttcccttctcccccataatatcaggaagtggaaccttctctctttagccctcagactcaggaggccaggcctcccctttcctcctccagcaggactcccacctagcctgaaggtcggatggatctgagcttctcctggcattccctacctcctctggcctcccggggggccagccactccctagaggagccccaggcttctgattccaaggtcgggttttcttccatggccccaggctgggctgtctctagtggccaccaggcagacactgccccaggtaagggaggggccaggggcaggtgtgtacctggccagcaggtggcccggagggagtaaggtacacttcctgtggtttctcagggccgctgatgcgaaaggtctcctgggagctgaagtccccgtggtgccccgggcctcacagtttggttcctgggctgggcgggggggctgtacctcaccctgggacttggtggactaagtccttcccaccgtttatcacccagatacctgcacggacacgatgcctttgtgcaacactttattgggaaagatttacacacggtgacctgtcataggccaagcgatgagaagagggcgccaggagtgctggggtcccgaggtggctcagatggaagccatgggacggccgtccccaggcccgcgcacccgcacctcagtttcccctttgtgaaatgggaagcttatgcttccttccaagtctgcaatattggtgcgatgagctaaaagtggagcgaaagacacaaggaagaggcttcccactcccaggacctgcccccaagctccgaccccacattgtggatgcaaagaaagggaatttgcccaaaacccactgcccaggggccccttccgttttggggaagtgcagtgctctctggatacccagaagctggagcaggggccagtgactcttgtctggacaatactttgattttgtaggagtggaggtggcctctgggcagagggcagggaggacacccccgggtctgcttcagttgcaggcagggtatttagctggggaagaggaaattctctccaggaccctctccaaggtaaggactctttctggggaggagacagcagcctggttcacagaattcccgggaccagctggcagagggagcgtcgtgacagcttactcctcccggagcttctccggggcaaggctggtgggctgggatgctgccttccgccggctggggctgcccccacctaaagccagccccagccccagggctgccagggccaggaagtggatacagaagtagatggaggcccagtaccgaagggtgtcggccaaggagagcagcacgaagcccatgcacatgtagtcataggcgcgcatcttcaggaaccagtgcacccagtcccaggccttctggccccctgggctcagccgcccccgcagggctgactccagccggccctcggcagccaggcacagcgggatggtcaggaagctcaggtagtagcccgggtggaggccgtgccagtaggcgctcagcagcatggtccaggcgctcctgaggaggaggctgggagtcaggacctacgagtccaggtccccagtgcccactgcccccagatccaggagtccaggaccccagcccctcctccctcagaccgagaagtgcaggcccagcccctcctccctcagacccaggagtccagaccccaccccttcctccctcagacccaggagatcaggccccagtccctcctccctcagacccaggagaccagaccccacctccctcctccctcagatccaggagtccagaccccacttccctcctccctcagatccaggagaccagaccccacctccctcctccctcagatccaggagaccaggccccaggccctccccactcagacccatgaccctagctccggaaggcggaggaggctacaggcctctgtctccttcagggatccaggagctcgcagccttccatacacactcagtcctatcaagaccctcttcttctttaaagatttaacattttatattccactgcccttcctctcccaggaccaacaagtcttaattcttcagcccagtggttttttttttttttttttgagacagagtctcgctctgtcgcccaggctagagtgcagtggcgcgatcttggctcactgcaagctccgcctcccaggttcacgccattctcctgcctcagcctcccgagtagctgggactacaggcgcctgccaccacgcccggctaattttcttttctatttttagtagagacggggtttcaccgtgttagccaggatggtctcgatctcctgacctcgtgatctgcccgccttggcctcccaaagtgctgggatcacaggtgtcagacaccacacccgggcagcccggtggttcttaacctggggtcccaggtctggcatcagcatcacctgagaacttgtgagacatacaaatccttgtccccaccccttttgcaccagaagccctgggggtggggcccaggagaagtcttccaagttaacaagtcctccagtgactctgatgcctgttaacatttgacaactcctgcctggctcatgaagatccagaagtccctggcctgtggtccttccttattctgggcccaggagatatgttcctcttcctccaaggcccagcaccatctttcctcactctttttatttttttggagacagagtctcgctctgttgccacacgacaaggctcactgcagcctctgcctcttggattcaagcgattcttatgcctcagcctcccaagtagctgggattacaggcaagcgccaccaaactcagctaatttctgtattttttgttgttgttgttcagacggagtctcgctctgccgcccatgctggagtgcagtggtgcaatctcggctcactgcaacctctgcctcctgggttcaagtgattctcctgcctcagcctcccgagcagctgggactacaggtgcccaccaccatgccaggctaatttttgtatttctggtaaagacggggtttcaccatgttggccaggatgctctcaatctcttgaccttgtgatccacccgccgtggcctaccaaagtgctgggattacaggcgtgagccactgcacccagccatttttgtatttttagtagagatggggtttcaccacgttggccaggatggtctcgatctcctgaccttgtgatccacccaccttggcctcccaaagtgctgggattacaggtctgagccaccgcgcccagcctctttttttttctttgtaaagatggagtcttgctatgttgacctggctggtctcgaactcctgagcttaagtgatcctctcaccttggcctcccaaaatactggaattacagatgtcagccattgcacctggccaactcttgttttcttgagaagggaggaccattggctttctggttcttcaagagtgcggaggctgggtgcaatggctggcacctgtaatcccagcactttgggaggctaaaaatacaaagattagtctgtcatggtagcacgtgcctataatcccagctactaggggggctgagacaggaggattgcttgaacctgggagggagaggttgcagtgagccgagatcacgccactgcacttgagctgtaaaataaacaaaaacgatggatcctgtgcattttaaggtgtttaggagcatccctggcccccacccacgacatccgactagcaccttccagttacaacaacatgtctccagggattgccatgtgtctcctgggggtgcagcagcagcacagttgcccccagttgagaagcacttgtctaaacactggggtgctttgacctggcctcagccccagagctttaagcgtcatctatacctggccagatgcagtggctcatgcttgtaatctcagcactttgggaggctgagatgggaggactgcttggggccaggagtttgagaccagcctggtcaacacagtgagacctcatctctatacattttttaaaaagtaaaaaaaaaataataataatacttaaaaaattttggccgggcatggtgactcacgcctgtaatcccagcacgttgggaggccgaggcacgcggatcacttgaggccaagagttcgagaccagcctggccaacatggtgaaaccctgcgtctactcttggcacgagaatcacttgaacccaggagatggaggttgcagtgagctgagatcacaacactgcactccatcctgggtgacagagcatcaaaatactaatactaatactaatactaatactaataataatatccttcttactcccaaaacttactcttcctgggtcttccccttccacatttatctaattaaattaaattaaattaataattatttttgtttgttttttgtgtttttttgtttgtttgtttttgagacagagtctcgctctgttgcccaggctggagtgcagtggcgcgatctcggctcactgcaagctccgtctcccgggttcacaccattctcctgcctcagcctccccagtagctgggactacatgcacccgccgccacacccggctaattttttgtatttttagtagagacagggtttcaccgtgttagccaggatggtcttgatctcctgaccttgtgacccacccaccttggcctcccaaattgctgggattataggcatgagccaccgtgcccggcctattttattttattttgagacaaagtctctctctgttgcccaggtgaccttggctcaccgcaacctccgcctcccgggttcaagtgattctcttgcctcagcctccctagtagctgggattataggcgcccgccaccatgcctagctaattttttgtatttttagtagagaaggggtttctccatattgcccaggctggtcttcaccatattgccctgacctcaagatgatccacctgcctgggcctcccaaactgctgggattacaagtgtgagccaccatgcctggctatgagttctacttctgttttttttttttttttttttttttttttttgagacggagtctcgctgtcgcccaggctggagtgcagtggcgagatcccagctccctgcaacctctgcctcccgggttcaagccattctcctgcctcagcctcccgagtagctgggactacaggcgcccaccaccacaccagggtaattttttgtatttttagtagagacagcatgtcaccatgttggtcaggctggtctcgaactcctgacctcatgatccacctgcttgggcctcccaaagtgctgggattccaggcgtgagctgccgcacccggctgagtttctgcttctaaaggctgcacagataacagtgtcaagcacagagtctccactcgagaaatattggaagaatgaaaaacaataaaaatgaatacacagcacgcacttacctgtcaggcctcacattaaatacatttcacattttatcacatttagtccttctatctacctatgaaaccagtaataaatagcattcactccattcaacacttgaggcaactaagaggtcaactaactcctcaaggtttctccataacctggacggccaagattccaggaaggctggctattgagtccacaggactcagtacattgcttctgctgagtgaggctgactttacagaagtagcaactgaggccccgagagggggaacgattttacaccggcatgctgccactataattagaggcagggcaaaaccaggctaaacaaactacaattcccatgagcctccgggggcaggggcccagccagggacgctgcaggctaccctggggcctgctgggagatgtagttctgcagtgtcacctgagactgggcgggctcactcaccgcaggacataggaacgggcaggtgcgctcttgtagatatactgcgccagccaccactgcaccgtcatgttccagtaccgcatgccatcgcgcacccgcacgcagaaatctgtgctgtagcagtcgatgttgcggatggtctcatagtcatactccaaggaagccgccttctccggactggggggtggaggatgagggtgggggacagacatgcagctcagccaggccccctcccgacgcctgctagtgtcccagccccggatgctaaggaagggatcctggccaggcaatggccctctggctgtcagacttgctagggcagcaagggagggtggcccagagggtgcctgtagggtaggaaggtgggtgggctgggtggtacagtccactgacaatggggttcttcttcttttggtacctaatggggcccgccacagccatgaaaagccttgaagggctatggttgctaagctatgagtcctttagcaaccaagctcagtatattcagagaagccgccaaggatggtcccttctaaattgtcggacactgcagttgccagggaagttgtggttatcatccctaataacaaggtgcttcacggttgctagggagatgttccaggcgccagtggggtccccatgatctttgttgctaaggaaaaggcattccttagcaacaatgcctaggatgtttagaaaggcttttaggaaggggcttttttcctggtcgcagtgattattggagaagtgtcacctctagcaatacagtggctccctcatcactcatgtcgacagccccagcagtgggaaacactggcccatatgaagccttggtggcctctgatgacaggaggggagccatcctttaggagtgaggaccgagcagatttagaaaaaccttcaattcctgcttggctttactagggggacatcctctctctagcagctggaggtcagggcacggttattagggcagtggtaacaaattcccgtgggggtgtcactacccccacaacagaatggcagtttgtgacgactaggggacaaccctagcagggagtagtagttcatcatttacatcaacaggctgttcccccagccgcagtccaagcccctgggggaaggctgactgcagctgtcaggaacacaagggcagtctactcctggttgccgggggtgccatctccctagcaacacgggggcaatacttcctcagccacaagagagtccacagctatggccgtgcgacttgcctagcaatgcaggtgccggggggtggagcctctctggcaacaagggtcaacccatagtttccagggggaggtttggcttccttagcaacagtgtaactgtagttggtaggaatggcgtgccctctgctggggaacagcactggtcagggattggaaattgctatttccttgcagagggctgctgagggctgctatgtgaggacatcccacggggtggagcagtgctagctcctagcaacaaaggggcagtgcagggagtgccgtatctgcagcaacagagcaaaacttctggtaaaaaggaggtgagctactgttgctagggatcctgcttccctagcaaatagtggcgttctgttgctagggaaccgtttccctagcaacagagggtgacccaccactagcaaaggatggcatccccagcaagcaggaacaatctggttctggggggtgacacttctgtggcaacagaggggtggcacagggttgctaagttaccaccttttcctagcgacagggggcagttcaccacactgcggggtgacaagcgctagcaacaaggggcatctgtcagtaccagggatcttttccctaccgacaggggctggcaggccatggttgccgagggggcgacactctgctcaaaaaggtggtggccctggccccttgctccccgctctcctcccggctaggggcagagccagcccttggaggtgggggctgctgggtcttgggaagcctccctcgcgccgcctgacctgctggggggtgggcattggagggtggggccgcctccggcccgggctttggcggccacggggtaggccccaaagccggcggcaatgcagccgcactcggcggcaatccaggccacgtagaagcgcatgcggaaggcgaagaagacggggatcatgtagaagaggcgggcgggcagcgggcgggcgtagaaggcgtcctcgcgcacggcctccagcgggaagaggtgagaggagagcaggaacagcaggccgaagagcggggccggccaggcgcggcgcagcaggggccgcaggctgggcactgccccggggaagggctgctccagccagtccaggtaggtgcggtagcggaagaacgggcctgtggggcggggagggagggccgcggtcagacaggcaggtgggcagagctcaagtctgcaggaggaggacagggagcttggaaggaaggtgggaagagggagtgagaggggcagagactgggcgccggggagaccccaagggtagggactgagaccctgagagatggggataaggaacgagagacaggggggacaagaaactcagagagacagagacagtaacagaaaaacagacagaggggccggtgcggtggctcacacctggaatcccagcactttgggaggcctagctgggaggactgcttgagcccaacagttggacagcagcctgggcaaaacggcaagaccccatcactacaaaaaataaaaatcagccaggtgtggagggcacctgaattcccagctactggggaggctgaggcgggaggatcgtttgagcccaggctgcagtgagcagtgactgagctactgcattccagccagggagggagggagggagggagggaaggagtgaagaagggaagaaagaagggagggaaggagggaaggaaggagggagggaaggagggaaggaagaagggagggaaggagggaaggaaggagggagggagggaaggagggaaggaaggagggagggaaggagggaaggaaggagggagggagggaaggagggaaggaaggagggagggaaggagggaaggaaggagggagggagggaaggagggaaggaaggagggagggagggaaggagggaaggaaggagggagggagggaaggagggaaggagggagggagggagggaaggagggaaggaaggagggagggaaggagggaaggaaggagggagggaaggaaggagggagggagggaaggagggaaggaaggagggagggaaggaaggagggaaggaaggaagaagggaaaagggaaggacggagggaaggaggaaggaaagaaactaggagatagctgtggcactttagctacaatatgatggtggtctggcctagggaggaagcagtgtgattcacagaagggaccggggttaaaatttttatatgttcacaaaggccgtatgtttaggtcaatgtagcatgggaagataaaaggaaaaaaaaaacaaattaaaataaataaataagaccacatgttgtatgattccatttgtaagcgcaatgtccagaacaggcaaatctttacagatagaaagtcaattactggttaccagggatggatggaggtttgtgggatgatggacatggggtttctttgcagggtatgaaactgttctgaatataactacacagtggtcatgtctgcacaactcggtgaatatactaaaaatcagggagttgtatgttttgtgttttgttttttttcaggaaattaaagaagccaagagttgtatgttttaagtggatgagtatgtgaattagagttccctaaagctgttattggaaaaaaaacctttgatgaggtaaacattaatgaaaaatattttctttttaaaatttcacatatatatacacatacacacatacatatatatacacacatgcacacacacatacatatgtattttttgagatggagtcttgctctgttgcccaggatggagtgcagtggtgtgatcttggctcactgcaaactccgtctcgtgggttcaagcgattctccagtttcagcctcccaagtagctgggattacaggcacacaccaccatgcccggctaatttttgtattttcagtagagacggggtttcaccatgttggccaggctggtctcaaactcctgacctcaggtgatctgcctgtctcagcctcccaaagtgctgggattacaggcgtgagccactgcgcccggccctttaattttatatttatttattttttaaaaataaaggtttaaaataaagggacgggatcttgctatgttggccaagttgatcttgaacttttggcctcaagcaatcctctcgcctcagcctccgaaagtgctaggattataggcataagcccccacgcccagatgaaaaatatttccttaagctgaaagtggaccctaagccgtgaatatttgttgtctgggaagcaaaaacatcaggttgacatagatctttacctcctttatctcttctctttgctcccaatacgctacaaggagaagagcaaggaattgcttaggttgagacagccagcttctaccccaaagcagctctggtccagcggaggtgtgagacgtagacccagacacatgcccaccctcacagcagcagatgctaggatggaggttgccctgggcagggcgggaacacagaacaggcactcagggcggaaggggacacaggagacagagcggcagagttgttagggcagccccactcacctgtcatgattcccacgtagcagtagctgtagctgagtgtctccatcagggagggcacgtcgggcagcagccccagggtgggccccttgctgaagcctgaggccatttccttcctctgggccagatgcaggtcctggacttcactggccaggctcaccagctgggcagaagggggtgggcaaggggccaggtcagactctgggcccttccccacacccatctcccttgcgcggctgccctcggcagccaaggggtgctgggtgcccgcagctctgcccatctaggttgtgtgtaacgcctctagctgggcggtgttccccagggctcagtcccaggccctcctcccctttccctgttctgtgcttacctgctctcacgcaatcacggaggtttcgatactatccacacgctgaggacgcccaaacgctaccccagccccagacctatccaatcaagtggcttattggcatttatactcggatgtctccaggcaccccaaacgcactggaaacggaacatgatgttacccaccccacaaggtagaccctcttctagtgtcacccctcaaacaacaggccaccaaattgttcaagccaaaaatctccctcactccccaaatccgatcctttaatctctctctctttttttttttttttttttttgagacaagttttgctctgtcaccaggctggagtatactggtgtgatctcggctcactgcaacccccacctcctgggggcgcaagcaattctcatgcctcagctggccaggctggtctcgaactcctggcctcaagtgatctgcccgccttgaaatcccttaagtttgagtctgttgcctctttccatctccactactgagctgaatatgttgtactctccaccctttcccaccagtcccaaggtccaccctatatcaatagatctccttcttccagcttgtggctgggttgtcagtagaaatccctggctggagacaaagtcaggagagggagggtagggcttttattcccttgtaagatggccttgggctggctgtcacccttgatagatcatttcaaggtgggtggctctacacaccctttaaaaaaaataattttggccgggcgcggtggctcacgcctgtaatcccagcactttgggaggccgaggcaggcggatcacctgaggtcgggagttcgagatcagcctgaccaacatggaaaaaccctgtctctactaaaaatacaaaaaattagccgggcatggtggtgagtgcctgtaattccagctactcaggaggctgaggcaggagaatcgcttgaacctgggaggcggaggttgcggtaagccaagatcgtaccattgcactccagcctgggcaacaggagtgaaactccgtctcaaaaaaaaaaaaaaaaaatttagggccaggtgtgacggctcacacctataacactagcactttggttggcctaggcaggcagatcacttgatgtcaggggtttgagaccagcccggccaacatggtgaaaccccatctctactaaaaatataaaaattagcaaggcgtggtggtgggcgcctgtagtcccagctactcgagaggctgaggcaggagaatcgctcgaacccgagaggcagaggttgcagtgagatcacaccactgcactccagcctgggcaacagagcgagactccatctttaaaaataaataacatttaaaaaattaattttttgtagagacagggtctcactatattgcccaggctggtcttaaactcctggcctccagcagtcctcccactatgacctcccaaagcgctgggattatacaagtatgagccactgcaccaggcctacacaaccctttttccatccaggtaccacaacctgacccatttcccctgggcctagggttgggaacggctccttctgccgggctggggttcaggcaccatcccttcttgctcttctacatcctgcccaattggtggccactccttcagtcatcctaaatgcgcgtttcctgctgcaactcagacctacccacagccagccaacggcctgtatcaagccaccacagtttgtcacctggactcggacaaaggaggatccctttatctgagtccatcccatcttgccctgttccacttcaattctccttcagcatccagaacgagttttctttcttttcttttcttttttttttgagatggaatcttgcccgggaaggcccaggctggagtgcaatggcgggatcttggctcactgcaacctccaccttccaggttcaagcaattatcctgcctcagcctcctgagtagctgggattacaggtgtgagccaccacacccggctcatttttgtatttttagtagagacggagttttaccatgttggccaggatggtctcaaactcctaacctcaggtgatctacccgcgtcagcctcccaaagtgctgggattacaggcgtgagccacccgcagctggcctagaatgagtatttctatttgtttatttatttttgagatggagttttgctcttgttgcccaggctggagtgcaatggtacgatctcagctcaccacaacctccgcctcctgggttcaagcaattctcctgcctcagcctcccgagtagctgggattacaggtatgtgccaccacgcccagctaatcttttgtatttttagtagagacagggtttctccattttggtcaggctggtcttgaactcccgacctcaggtgatccgcctgcctcagcctcccaaagtgctggcattacaggcgtgagctactgtgcccagccagaacgagtatttttaaacatttaaaactggtcacattgcctcttctggcagcaaaccaaaaatcccctcttccagcagatctcaatcctccacgggaagaagtccaatgtcctcacggtctccagccaggcctagcacggtgtcagccctgctgcctgttcccttttgctcgtcccagaaagtggatgtggctggtgtagcctgtggaacccagcctgctcccctccacacatcctgcggcctgaaatgctcctccacgaacccctctctcatccaacctactcctgccaccactgagctcccacagggcacactgaatgctgggaaggccactccctacctagcatgactgctgtgttcacggataagccgccagtaggaaaccatgactctgtgggtctggggtgggccctaggattctgtttttacccctcttcccaggtgattaggagccagacctggatgccctagttttgttcccttcaccaagtaccttctccccagagctggtttttctcctttgcaaaatagctggctacagagattcaaggacagcatgttggtaaaccacccagctgggcctctggcacaccgcaagcacccaatggcacctactgttaccctatgtgggttatttcctcaccccaggaggagctgggaggtgaagacctgcccaagggcatgtgaatggggaatgctgtgcccagggcagcaagtgaggtgacgtcccacccccagggtgtgttggaggtaaaatcccggggagccactgaagggggaggtaaagtgggaggtgaaggggcccacagggaggctggaggggagtggcaagccccgagtctgaccttcagcgtcagcagcagctggacggcattggtgaagggcgtgggagtgggcaggcccaggaggctgagggctcggaagaacaggagataggagaaagtccaggccagagccagggcgtggcaggagctgggcaaaagcaggaggcgcactgtgttgggcacagaagtctcggccttggccactcactccacgagtccagccaccaatcctcccccagctctccccattcgtttagagacagaaacacagaagggcagagaggacaggagggtggatgtagggaccgaatgagtatgattgaaacagtgggagaagaggctcagccacatagaaacacacaccaacagagaatgaggttaagagaagcttcgggtgaagaccctgcaatcctccactttttctttatttccgaggtccagggctcaagaagagagaggtggatatgaatgaatatgaacggtggccaggccagcagacacactgtccacctctctccatgacatggatgtagcggactgggacaaacacacagggaccagacgcagaaggcaggggagaaagaaaagcagatgaaggccggatgcggtggctcacgcctgtaatcccagcactttggaaggctgaggtgggcagatcacaaggtcaggagttcgagatcagcctgaccaacatggagaaaccccagctctattaaaaattcaagattagccaggcatggtggagcatgcctgtaatcccagctacttgggaggctgaggcaagagaatcgcttgaacccgggaggtggaggttgcagtgagccaagatcgtgccactgaactgcagcctgggcaacaggagcgaaactccatctcagaaagaaagaaagaaagaaagaaagaaagaaagaaagaaagaaagaaagaaagacaaacaaacaaacatgaaacagagaaatgagctgatcaacaagagacagctagacatgaggcagaagctgaaaaagactcaaagaggaaacaggttgcttccccctctcccctcctctccctctcctccctccaccaaattctcaccagggctgggcctgaatgagggcccaggtcccgaggatggtgaccagagaatgcaaagtgtgggggccacaggtgaacagggtgagccccaggcccacagcggctgctccccatctcttcagcccaggacctgcagggggaagggacagcataagcctggaaccttccagagggtcccccccctttattttccactggggagggagcctgactcaccggctttcttaaagaggaagccgatggggatggagataagaagaaccactagatacgtccattcttcaggcgacatggtctgggggaggggcagagattcacagtgagaacccaggaatccaggccccctgcctcctccctcttcgaggatccaggaacccagccttctagaccccagtttttgaggatgatggagtatgagcctcagctcctctcctttgagaacctagcaacccagactccagccccttcctccttggaggagacaggaatccacccccagcccctcctttgagcgcacaggcctccagctctcctgtccttggagaacccaggaaagtgtggggatctcccagcacccaagcccctcctttgcgaacgcagaaatcaaagctactccccgcacccatactggggacccagatttgaagacgcccctcttttaaaaacccagaaacggcacccctcccggacccttcctcttcgacagcccaggaatctagacctccgagccccctcttccagcgaggatccaggaacccagaccccctctttggatcccccatcccccggcccttgtgaaaccagatatccggaccccccagcccttctccttcgagaccacccagaggagcccgggtctccaacctgcacctccttcggagctccacacccctctcctactgagaacccggggatcgaacaccctcccctccccaggcccaggcccaggcccagccccaacccgtcccgcgcaccccagcgcatccccggcagagccacaggcggttgcgccagccccgagttccaacgcgcctccggggccgccccgcacccgccagcccgcagagaccctgccgccgtgtaacctcgcctcgccactgggcgccgccaccctggcccacctgagctgctcgccgggcaggaggcggccgagcagtcccagcccgcttgccgccgcagctccggccacgcctcccccgcccagcgcgcccccgcgccgcctgctccttctgggcgcccgccgggctgcgcagatcaggccggggaagaagccacggtcagggccccgggcgggcagggaagaagccccggagcagaagccgagagcgcgagtcggcaacgggattcgagtccaggtccacactgggatccgagctccgagtacgtgaaggggcgggccttcgggctcggaacaaggaggagccaaaagctttggacccgaaggggaacagacgggctctggaaaggaggcggggtctggagctcggcgtgaggaatgaggcggggtctcccttcgggttccttcgggcacaatcgggagcttgagttctccggaagcggggccacaaacttcggctcacttcggcaatagtcgagaacggagagctgaggccactgtgggcggagccacatgtttcggctttcttcggaggtagtcgagtccttagggtcactgttccgatgtgggcggggccacagactcggccggatgtgggtggggccacaagcttcggtttacttcgtagatagttgggtacaagtgacgctaggatgataggcggagtcaacaggttcgccagacacccatgagtatttacaagggggcggggcgaaagcgacttgccctcaaaggggcggaaccccgagggccggcgtgcgcctacgggaccgggccaggatgacgatcctcaagttcccaagtagaggagaggaagcggcagagggaggtgcgctcagtggggcggagccaaggtggcccccgcgggaggagggcggggcttcggtcctgcgaggggcgggacctgacttcccgcggcgctgatggggcgggatgacgaagttgacgagggtgtcggcatgagggggtggagcaaggagcgcgtggcgcggtgcgcagtgggtggctccacctcgactgcgaattactgtttatgaggtgactcgctggttctatcggtggacagtgggacattctgaagggaggcaaggaggcggactgagcgctcccaattggggtgagcccgcccgagcggagagtggacggcgggtgtccagggggcggggctttcggctgtggggttcggtcgtagggcgggaactccccaactggggtgcgctggcgctcggagggggcggggccacaggccgcgaggctgccgggagccgatgacgcccgaacgccgaacctattgcgtccgggaggaggcggggctacggattcggccgagccgagaacacccgaacgtcaaattgctggcgttcgagaagggggcggggctgcggattcggtggagccgaggacgcccgaacgccgaacttcctgtgctcgggagggggcagggttttgtactgtgggagtctgagagcgaggaggtccgaaagccgaatcacagtcgttcggaaagaggaggagcgaaggctcgagcgtccggaagagggtgtggcctcggcggtgccttagcctccagagcttctgaccgctgacgggaacacccgaagggggacgcccactttgcaagagggtggtgccaaaatggacctttgtaagggggcgtgtcgccgcgcttgcggaggtttgtttttcacgctccaaggcgcaatggtaggtacggcagtgcgggcacagagcgggtgccgaccgcagggtcacaagggtagagcgggaccctgggggcttggcgaggggagagggtcgggggcttgtctccggcgtctcgtctccggcggccgcgaggcctggtgggatcgcccgggggcggggcctggcgctcgggcccagcaggtggtgaacggcggctgagcgaggccccgccccctgaggcctaggggcggggcttcgccgagaccccggaggctttgggtgcgctgcagcggtccgcggcgcgcagctgtttcggtaactgctttgcctcccggctcccgcaggaggatgctggtggtggaggtggcgaacggccgctccctggtgtggggagccgaggcggtgcaggccctccgggagcgcctgggtgtggggggccgcacggtaggcgccctgccccgcgggccccgccagaactcgcgcctgggcctcccgctgctgctgatgcccgaagaggcgcggctcttggccgagatcggcgccgtgactctggtcagcgccccgcgtccagactctcggcaccacagcctggtaagggggcggggctcgaactcgggttcggtgggagcgggacctgggagtcaagtttcctggcttctgaagggaccataagcttggaggttccagcgaagtgtgcttctcaggccctgacatccttcaagcgccagcaagaggagagcttccaggagcagagcgccttggcagctgaggcccgggagacccgtcgtcaggagctcctggagaagattacggagggccaggctgctaagaagcagaaactagaacaggcttcaggggccagctcaagccaggaggccggctcgagccaggctgccaaagaggatgagaccagtgatggccaggcttcgggagagcaggaggaagctggtgagcatgggaggtggagtccagggaccacgggaaggagaggagagatcttttaggaattttagctgggaatccagtgcctgggtctccctgagggtgagaagactttaccccttgaatttaccaaactcttctctgtactccccaccaggcccctcgtcttcccaagcaggaccctcaaatggggtagcccccttgcccagatctgctctccttgtccagctggccactgccaggcctcgaccggtcaaggccaggcccctggactggcgtgtccagtctaaagactggccccacgccggccgccctgcccacgagctgcgctacagtatctacagagacctgtgggagcgaggcttcttcctcagtgcggctggcaagttcggaggtgacttcctggtctatcctggtgagtatgggttggggcctctggttgctgtgcctttccatacgatcccaatgtattctgcgtttttctttttttttttttttgtcttaatagaggtggggtctcttgttgcttaggctggtccctattcctgggctcaagcaatccttccacctcggccccccaaagtgctggaattataggcccagctgcatttttcttttttgtctcactttctcttagcctctgaaattcatagacagacaggaaacatttgggagctcccgaactcattgggcaagcagtttaacgacttttattaaatgattactgtgatccagaagattcacttagaagtagttagacatcaggctgggcgcaatggctcacgcctgtaatcccaacactttgggaggccaagacaggtggatcacctgaggtcaggagtttgataccagtctggccaacatggtgaaaccccatctctactaaaaatactaaaactaactgggcgtggtggtgggtgcctgtatttccagctactcgggaggctgaagcaggagaatcatgtgaacccagggggcagaggttgtagtgagccaagatcgtgccattgcactccagcctgggggacaagagcgagactttgtctcaaaaaaaaaaaaaaagcctagaagtggaatagttgtgtccaagagcatctgttttagagtatctatagtgatggctgaaatgatctcagatctcctcccagtggtcgttcccgtggcgtccagccgtctgccattggtcactgcttcagtgcctctctccttcccccaggtgaccccctccgcttccacgcccattatatcgctcagtgctgggcccctgaggacaccatcccactccaagacctggttgctgctgggcgccttggaaccagcgtcagaaagaccctgctcctctgttctccgcagcctgatggtaaggtggtctacacctccctgcaatgggccagcctgcagtgaactccagagacctaggggatgtggctgtgtcggcagcaagagcctttctggatgttccccagctcttctctgggagtctagaacatcctcctacctttctccgcggttagtttttgattccaggttttcgaacactacatcttttttatgttcttccttgtttcaaagcacttattggctgtgtttttgtagttacctattttcacactgtgagcttcccgagaatggggcctgggtttgattcatctgttttctacagggtttaagtctcaggaggtctcaataaacttggtatataaatgttcatgatttgaatgtttgcgacagtcctggaacccgtggatggtctcatctgcatgtacaggtgagaaaaaggcctggaggagggggactgacttgcccaaagtcacacacttagtaaatagcaggcctggcctttcaaaattggtttttctgactcctaaatctgcactctttctacctcactaaacttccttttgaaaagatttctatgaaatttcccagatgcatacaaacgttataaataaaaatataggctgggcacgatgacccacacctgtaatcccacagaacttttggaggccaaggcagggggatcgcttgagcccaggagtttgagaccagctctggcaacattgtaatacccagtctctacaaaaaataatttaaaaaaaaattagccagggatcccttgagcctgggaagttgaggctgctgtgagctgtgattgcaccactgccctccagcctgggagacagagcaagaacctgtctcaaaaaatatatatatgtgtgtgtgtatatatgtaaatatacacacatgtatgtatatatatgtgtgtgtatatatatatatattatgaaaggaaatgagtattgtaattttaggagttcagagcctggggagaaaggaaggactctggaaggcgttctgctttttcatggcctgggtagtggtgaatttttttgatactgtatatttatattttagactcttttttggatgtgttatattctgcaatttttataaaagctaaaacacatgtatttgtaaaaaatttgcacttatgaaatcatttacccatgtttttgcttaagaaagtactagaacactaccactattccaataattacacctttatcttatcaatgtgcagttttattttgtcacgtttattttgtcagtgtaatacattcacatggtgagtctgggcgtggtggcttatgcttgtaatcccagcactttgggagaccaaggcgggcggatcatgaggtcaggagttccagagcatcctggccaacatggcccgcctctatgaaaaatacaaaaattagccgggcgtggtggcgggcgcctgtaatcctagctactccggaggctgaggcaggagaatcacttgaatctgggaggtggaggttgcagtgagccaaggtcacgccactgcactccagtctgggcgacagagctagacactgtctcaaaaaaacaaaaacaaacaaaaacttccacatggtaaaattctggggctgaaagtctccacctctagttcttccatttcttccccccatgtttcattctttctcttttttgtgtgaattgagcagcctctggaaccagaataggtttagagagactcccatctcccctctttcttgccattcccagtaaacagacttcatagaatctcaatttcctgtaagtttagattaatttaaaatatgacactgggccaggtgtggtggctcacacctgtaatcccagcactttgggaggctgaggtgggcagatgagtttgagatcagcctggccaatatggtgaaaccccatctctactaaaaatacaaaaaaaaaaattagccgggcgtggtggcatgcgcctgtactcctagctactcaggagcctaaggcaggagaatcacttgaatccgggaggcagaggttgcagtgagccaagatcgcactactacactccagcctgggcaacaagagctaaactccatctcaaaaaaatgaaaagaaaaaaaatgacgctaacccctgtctggccaatactctctttgtgcctgcttcataattggctttgtaagtctattctccaccctttctcctctctacaacaaagtacttagaagtctcattccctctgtcatgagtctctcctctgaaaagttcctcatttaaaactcctgtggccagatgtggtggctcagacctgtaatcctagcactttgggaggccaaggtgggaagatcagttgagccgctgagctcaggagtttgagaccagccttggctgaacatagtgagacctcatctcatctctatttaaaacaaacaaacaaaaaaaaacttttgtgactggtgtccccccatgttgtcagtcaacaaattctataggtgccatgttcaaagcactgtggatccacagttaggccccaccctccaccttcactgccagtatcttagaaaaaccaaaccatggctcatttgatattgatagcttcctaactcatcccctgccttccattcttgcccctctgttgtctgttttcaacagagcagccagaatcatcgttttttttttgtttttttgtttttttttttttttgaggcggagtctcgctgtcgcccaggctggagtgcagtggcgcgatctctgctcactgcaagctccgcctcccaggttcacgccattctcctgcctcagcctccctagtagccgggactacaggcgcccgccacctcacctggctaattttttgtatttttagtagagacggggtttcaccatgttagccaggatggtctcgatctcctgaccttgtgatccacccgcctcggcctcccaaagtgctggggttacaggcgtgagccaccgcgcccggccagaatcatcatattaaaagataagtcagaccatgtcacagctctgtctaaaactttcctggagttttccatctcagagtaaaactcaaaggtcctactttgcagcttcctcatgaactggccatgtgcattctcttccttgcttattattattattattatttattttttttatttttgagacagagtcttgctctgttgcccaggctggagtgcagtggcacaatctcggcccactgcagcctctgcctcctgggttcaagtgggttcaagcgattctcccacctcagcctcccaagtacctgggattacaggcgcctgccaccacgtcaggctaattttttgtattttagtagagacagggtttcaccataattgcccaggctcgaactcctgagctcaggcaatccgcccacctcagcctcccaaagtgctaggattatagacatgagccaccgtgcccggccagctttgttcctctttactgctggatattccattgtatggacataaccccattttatttatccattcatcaggtgattggcatttgtttctagttaaggacaaggttttggttttggtttttcttttatttacccttgttcatgcagtatccccaggtccaagaacagttcctggcacacagcagtcaatacattgttgctaaataaatgagtggcttaaactataatttttaaatcagggctgagacaatttggaaattataatttctcctacatgactttctaagcatattttaaataaatatacatacgttaaggtcatttttattaatgaaaattgtagcatactatgcacacttctgcatcttgcttattggatatgcccaggcttgtctcatttttgccaacagctacatggttttgcgtcctatggatggggcataattagattttattacacttgtacaaaaggaaaggaattcagctccccaagcatgcccagctggtccttggcaacccatgatggaaaccaagggttcctcttatattacccgtgctcctttcagagaggaagggctagagggctccagcctgagtgagagagagagaggaggaagcatgaggggtttgtggaagagggcctggtgccatatgactggaccatgcttctgaagaggatcagggtgaggccagatctcatcagttgacccttgagcaacatgggtctgaactgctcgggtccacttttatgcagattgaaaaaagtaaaggttacacagagcatgcctgcctctcctgctttgccttttacctcctccacctctggcaccctgagacagcaagaccaaaccctcctcttctttctgcacctctgcctactcagaatgaagacaaggatgaagacctttatgatgatccacttccacttaatgaatagtaaatatattttctcttttttagaattttcttaatattttctttttttttttttttgagacgaagtctcgctctgtcacccaagctggagtgcagtggcgcgatcttagctcactgcaagctccgcctcccgggttcacgccattctcctgcctcagcctccccggtagctgggactacaggtgcctgccaccacgcccggctaattttttgtatttttagtagagatggggtttcaccgtgttagccaggatggtctcgatctcctgacctggtgatccgcccgccttagcctcccaaagtgctggggtaacaggcatgagccatcacgcccggccaatattttcttttctctagcttaattcatcataggaatacagaatataatacatatagcatataaaatatgtgttaattgactatgttattggtaaggcttccagtcaactacgagtaatgttttttttaaatcctgagacagtgtcttgctctgccagctgggctggggtgcaggggcatgatcttagttcgctgctgcctcaacctccttgactcaagcagtcctcccaccacagcctcccaagtagctggaactacgggcacacaccaccacacccagttaatttttctgttttctgtagagtctgggttttgccgtgttgcccaggctggtcttgaactcctgggctcaagtgctctgcccacctcagcttcccaaatcccacctggggttacaggtgtgagccacggtgcctggcctagtagttaagttttggggaagtcaaaagttatatgcagattttctttcttgatttttttttttttttttgaggcagtcttgctctgtcgcccaggatggagtgcagtggtgcgatctcggctcactgcaatctccacgtcctgggttcaagtgatgctcttgcctcaacctcctaagtagctgggattacaggcacctgccaccacgcctgcctaatttttgtatttttagtagagaccaggttttgtcatgttggccaggctggtctcgaactcctgacctcagttgatccgccggccttggccttccacatagtgctgggattacaggcgtgaggcaccgcgcccagcctatatggaggttttcggctgagctgggggtcagtgcccctcgcccccagactgtacagagtcagctgtgttaagatattaagcaccttcagtacacaagactctgtgctggttttcttttcttttttttttttttttactctaaatcatcaaaccctatgaggaaagtcctgttactttctcccatttagcactcttgaagaggctaatttgcctaagatcaagagctcgtcagtgactgctgaggttcaaacgcagatcttttttaagacttgagaacctacaggttcaaccaccattataaaaccatctctgtaatcacgaggcacccggaatttgtggagcttggacttcatcctgaagggagtgaaaacttatggaagttttttccttccacgtttcccccttccagatgaataatatacgcgtgttcaagatacaaaaatgcataaaatttggccaggcatggtggcttacacctgtaatcccagcacttggggaggctgaggcgagtggatcacttgagcccaggagttcaagaccagcctgggcaatatggcaaaaccccgtctcaaaacaacaaaacaaacaaacaaaaaacccataaaactgaacaaggtagtttgtaagatatggaagtacaatgcagatgacaataatgacgatggtagctaccactaggcgctttatttatgccactctcctcaacactggatagactctcacttaatcctcacaagcttatgaggtaggcgctaccatcattcgccgttttacagaggaggacgctgaggcacagagtgattgagaaacttgtcgaaggcactgcagctggcaagtggtgacgtggcatttgaatccaggcatccggatggtgtggatgccgtggaagagaaaggggcgggtgggactgcttcctgaggagatagtgactgccgaggcagcagcgtagggaagacaactgaagaacacgagctgtggagacagaccatcgcattcggagtggagagatgggtgtacagacagacaataaccagactatatataaaaagagaactctaggtcaggcgcggtggctcacacctgtaatcttagcactttgggaggctgaggcgggtggatcacttgaggtcaggcgttggagaccaggagttcaaaaccccgtctctactaaaaatttaaaaattagccgggcatggtggtgggcgcctgtagtcccagcttctcgggaggctgaggcacgagaatcgattgaacccgggaagcggaggttgcagtgagccgagatcgcaccactgcactccagcctgggtgacgagagcgaaaaactccgtctcaaaaataaaataaattactgataatagtactaataccccttaagtggctattgataataatagtaccatgggtgggggggcaacttctctgagagtgctctgtaagtatgtattgaagattgagtaaatacatttaaaattcttagaacagtatgtggcacatagcgttccagaatgccacattattgttagtgacagaaataatctcggctgggcgcggtggctcacgcctgtaatcccagcactttgggggggccacggcgggaggctctctcgaggccgggagttcaagaccagcctgggcaacatggcaagacgccgactgttaaaaaaaaaaaatgctacccgggcgtcgtggcgtgtgcctgtaatcccagctactggggaggaggtgggaggatcgctcgagcccgagaggttggtcggggcctcagtgagccgaaatcacgccactgcactccagcctgggcgacggagcgagaccctgtctcagaaagaaaaagaaaaaccaccgtccaggggcggagaaggaaggttctccctacttctcaggtttccactccctggccggaaaaaacctagtcctcccaggttagcacgccgctctagcccagcctcacgtctccactgcttctcagccagccaacgcctcttctgattggctctgacgtgcgtggtgcgtgaaaacgtcacgagacgccggcgttactataagagcgcagccgtggcgcttccgcgcctctttctcagtgaccgggtggtttgcttaggtgaggtgcggtggtgtgctttttctctagggtttgggttggatggtggcccgggccttccgagtttccatgagtaagctaaagacgttaggaaacagagcagggtggttgaacgggagtgcagcacggttgtgggggcagatactgactatgagagcgttggaggttattctcgcgagatcggatctgggctccgcgaggttttggcgtagttgtgggactgcgcaggcgccgtttggatcccttacgctcacacttctctcccgcgcaggcgcagacggggaagcggagccaacatgccagtggcccggagctgggtttgtcgcaaaacttatgtgaccccgcggagacccttcgagaaatctcgtctcgaccaagagctgaagctgatcggtgagtggccaaggcttccgggaagtggttcggcttccgggaggcggttagcacgtggatgaaggtgcccatgtactctatctagtccgtcccctaaatttggtactattcgtggtttaggaaggttttgtgattccaaagctgccagtctagttgttgtgccagtacgtgggactacacttgtccacccccttctccccaccaggcgagtatgggctccggaacaaacgtgaggtctggagggtcaaatttaccctggccaagatccgcaaggccgcccgggaactgctgacgcttgatgagaaggacccacggcgtctgttcgaaggtgcgtatgggagtccacagcagagggatggggtgcagggcttgtgaggttcattctcccttctgttgcctctgttccagtgatgagagttgtgtcattggataaatggaaccagccttctaacttttagtggcacttgtggagtaggaaaagtgtatctggatcagtctttgccctgtttcttaggtgtgtggcttttttgcccagttattggaccttcagtttagtaatgaccagagctaaagataggcctggcacacctgggcacccgtctatatctttatattctgtttatgtggcctgtttgctagtggatgagagtagactatgaagtggaatttctgggctaagtgatggtgataacagggtttgcacatttgcttggtttattgtttttttaattaagttttctcgttttatttagtcttttgagacggagtcttgctctgttgcccaggctggagtgccgtggcgccatttcggcttactgcaacccccgcctcctgggttcaaacaattctcctatcttagcctcccaagtagctgggactacagacaggcgcacgccaccacacctggctaattttacttttgagacggagtctcgctccattgcccatgctggagtgtagttgtcgcaatcttggctcactgcaaactccgcctccagagttcaagcgattctcctgtcttagcctcctaagtagctggaatcacaggcatgggccaccaagcctggctaattttctattattagtggagatgggttttcaccatgttgtccaggctggtgcttgtttttttaagctggtcaaggacatttaggtggtatttagcaaaggcctgaacaggagagaacctgtaaaatgtctcagggaacagcatttcaggtgatgactttaggagggcatgcagatcacatagacttaggcttactttactaattgtggtgaaatacacattaaattgaaaatgtaccatcttaaccatcttgttttaaaatctactctgagatgcggtgttattggagtgctttctacagcagattggcatgaccaagattggcatttgtatatcctgagacgctgcttttgcctgagtttgggtagtcatgatttatggtgaaaagcagtctctacacctgagccctgactgttaggcatgagagtggtcatccatgttaggcgttgagaaagtcctggcgcatgtttagctacagattatcacagtttgtcccaggcttgcagatgttagaagctttttctttaaataggcacaggatcttgcagtgttgaccaggatggtttccaactcctaacctcaagtgatccatccacctcagctttccaaagtgctggggttacaggtgtaagccaccgcacctgaccctttcattcttttcgtcaatttgtagaccccgttgataatctcatgaaagtgctggagatccctcccccatagatactgatgctgggtgggaattcatcccagggttctgtggggagtgggctatagctggttctggttttagggaggactttctggacatagatcctaattgcaatgaaacttacagtcatgtgagaaagcggtgcaggtgtctgagggttatttgtggttttccaaggcagaagtgaaaattcccaaggggtacacagttgttcaggtgagtacactttctagtaaatgaagccatctagcctagtcagggacaggaaggaggagcttggatgtttgctctttggtgtaatcctgccttgattcagatcctgcctttcccactaagatgtgtgactagcgagattctgagtctcgtctgttaagactgaacagccgccaacatttggctggcagttaataatcaacagatagaggccaggcgtggtggctcatgcctgtaatcccagcactttgggagaccgaggtggtcggatcacttgaggtcaggagacctcaagtcagagaccagcctggccaacgtggtgaaattccatctctacgaaaaatacaaaaattagccgagcatggtggtgtgcctataatcccagctactcgggaggctgaggcaggagaattgattgaacctgggagacagagactgcagtgagccgagatccgcggcactgcactgggtgacagcgagacacaaaacaacacgaactccccccccaccccccagcacaactgtgaagaaatgtaggagtcatgtccatttttcagatcagaaatgaaggcattgtaatacctaactgccttgtatgatgacaaggacctgtttcccactgaggtcctccctggtttgcatttttaaagcattttaaattctcttggtgcattggcccagtggagcctcagcagtaggacatgcttttgttgaaggtgtaaggtttattgtgctgttgaaaactattgtcttcatacttaaaggttttgcctgtggctgactctcctgttctttttcaggagatagatggttcaataaatgtgggcctgagtgcagtggctcatgcctgtaatcccagcactttgggaggcagaggcaggcggatcacccgaggtcgggagtttgagactagcctgaccaaagtggagaaaccccttagtctctactgaaaaaatacaaaattagcggggcgtggtggcgcatgcctttaatcccaggctgaggcaggagaatcccaggaggcggagtttgcagtgagccgagatcacgccattgcactccagcctgggcaacgagagcgaaactctgtctcaaaaatgataataaatgtgaaacatttttttaaaatcatgcctttgttttgcctaatggtgacgatctcactttgtctcccgggctggagcacagtggcatggtcgtggctcactgcagcctggacctcctgtgcttaagtgatcctcctcagctctagtagctgggaccacaatccaccatgtaccaccatgcccggctaatttagttttacttttttgtttgttttggtacaaatgcggtctcactgtgttgccgaggctagtttcaaacttctggactcaactgatcctcctgcctcagcctcccaaaatattgggtttataggccaggcataagggactgtgcgtggcttaagtttccattttctaatgtaaagacaaaaaggcgtgaagtgtccaaagaggtaaatggtcccaaactcattttcattgccttttggacatgtttttgtattttgatattcaggtgtttaaatatcctctgatgttgagttaaaaaagaacaaaaattgaagccatagtatgacataggatgctggaaatgcacacagctggtgtttccattttgattctccctacctgtaactgctccctactgggaaaactttgggtcctcacaaagtgagctagctttctttcaaactttgcttggagggtaacagtgccaggaatatcagaagtgcctgatgcatgtagatctatttatgaaagcttgcttgaatggtttgctgtaactagtaagagccactttttataaaagtgcacataaggaaaaaaggttgaggtgtttaccccagtcaaggggcagttgatttgctgaaggcgtgtgggattatagcagtgagcgggagcctaggggatggcgtttgcccccagggccctggggctgtgggcaagggcagtccagagtattagctagaagccatggctttggacagggtaaggagcaagccgtcctgagcctggggttggaagaaaggtgtagtagggcatctgttggatattttatgcagtgcattgttaggttatatacatactagatatatttttggtggaaaattttgtacagaatagtaaaatgaatgacatgtacctagctggaaaaattctagtgttagaaattacttttctctccttaaaagatgtagatactgctatttatggcacggaatgtgattcaatctcacatctgcttaatcagaagagctgtctgggctgaggatatgaactcttcagcactgtgctttgttacggtggtagtagcttaatagcagctgcatttggtcttttgcagactgagtccttgtaaggaggtgatttcctttactcttgctaagaatgtggagcgagggatgtatgctctcagatgaggaggcaggtgtattttgccctcctgtcatctgcagtttactatgaatgatgacctgacaaccatagggtagtttggttttttgtattgttttgttttgtgacagggcctcactctgtcgcccaggctggagtgcagtggccccatctcaggtcactgcaacctccgcctcctgggttcaagcagttttccttcctcagcctcctgaatagctgggattacaggcagtgcgccaacggcctggctaatttttcgtaatcttagtggagacgggctttcgccatgttggccgggctggtctctcaaactcctgacctcaagtgatccgtctcggactcccaaagtgctgggattacaggtgtgagccaccactcccagcccgtagggtggttttgacagtgacatgggtcacggtgatggcgctgtactacttgtgcctcaccgccgcggcatggagctaccaagaggcggagccaggatttgaacccaagaagcctgaggtcagaaggcggaatcagtgtttcctcccactcttcccaggcaacgccctgctgcggcggctggtccgcattggggtgctggatgagggcaagatgaagctggattacatcctgggcctgaagatagaggatttcttagagagacgcctgcagacccaggtcttcaagctgggcttggccaagtccatccaccacgctcgcgtgctgatccgccagcgccatatcaggtaccacctcggatgggcacctgaatcttcctccacctgcccctctgatggttgccctcactaagcctgctgtccctatctcctatgcagccctcggaggtgatgggtgtgaactcacccagagggtacagattcacccttgcacacagctcaccagggagctggggcagcctcttgccccaatagcccagcgcaagggtcactgcggctctagccgtacaccttgtgaaggcctctgccaggcatgtgggcagctggacaggtaacagctcttggtgtccccagtggagggagagaaccagcctcacctcgcttgggtggtgggttcagctgtctcctggcccgcttgtgaagttgattccagaccccgatccatgactgcgttctgggtactcagtgtgccctttctgtaatgtggcaccattgagggggaggagctgtacagaaagagggcaagatgtttgcgtttagaatcttcgccccagcccttcactaaccctgtgagccgtaggcagagccttgtgtgtcaatgctttcgtcggagacgtagcctcgggttgctgtgttattgtgggcattgctgctgcacgtggtaatacagctcagtgtcaggtgtggggttcacgatatttcagactcggaacttgggggctctcacatggccatctcatttgctttgtggtcttaggtgggatactttcggatttctcctataaaatggggttgagaaagtcatctgaagcatttttggggattaaggtgataccctaaaaccccggagggcgcacgtaggatcaggtgcacccttcctgcagcgccttggtgtctgcagccgtggcggcctcacggggtgggtggagaggaaagagtggtgcggtagctggggttagcgtccgtttctcctccagtccacctcaccttgtcgctgcttccagggtccgcaagcaggtggtgaacatcccgtccttcattgtccgcctggattcccagaagcacatcgacttctctctgcgctctccctacgggggtggccgcccgggccgcgtgaagaggaagaatgccaagaagggccagggtggggctggggctggagacgacgaggaggaggattaagtccacctgtccctcctgggctgctggattgtctcgttttcctgccaaataaacaggatcagcgctttacaattggtgtgtgggggtctctcatccttgactctttcccctgctctaaacatgcagccttccctgggaggctcactcacttgggagtgcctaccagctagtggtccctggcctctcagtactattctacagtagtgaacacacatctttaccagaaacttctgtcatcaggggagagacgagtggtatttttggaaaaactgtgtcaaaaccagaaggaaattccaagtaagccggtgtttgcatataggggtgggagggagccggtcattgctaggcagggcaggcgccgagtggaggtgggggccttccctgcctgctggccctgggaccctgaccccgccaggcaagagacaggtgggacgggagctgaccagaggctgacgggttgctggggaaggtgaactgttggtgattgttggggaacacttcacagaatttgcttgctagtttcaaagcttgtgatgcagttgatgttgggcaagttcccagttttgtcttcacatgtaggggaagtgggttagcgtaggagaaggggcgttgagggaagtctgttcctcctctccgcgttcagtgcttctgtggactcacggtcaagaggttggcaggcttcccttttctcagccttgttgatcatctgtgttgggaaggggtttggtttctgaggaagtgagaaacctgaaattgtgcaaccccctcaggctgcaggctgtagttgattgggtccttatctggaggccttcagggtttgaggtcagggcagggacagttctggaacacagctaagttactgtaaaccacgtggagaagtccattgcggcttactcaagctaggtggttggcccttccttccctcagcgttgctacttgggaaatgacggtggtcttgtgtccatggggccagctgctgcaccatctgggctcactgtggtctccttccttggagcgtggggtctgggctagtggatggccggggcagcgtactcactgggctcctgggagctcccctgggaggaagagactgcagttgtctctggtctgagaggtggtggctcacctgggtgtagctcacaattgcggagctccacggcagcctggagggaggggagagtgggagttgaggtatgcggttctggggagaagcctacgggcttggaaaggaaaagggtcttcagggctctgtctacagaggcagcgagcggggcaacagagggagactccatctcaagaatttgtagagatggagtctcaatgtgttgccccggctgatctaaaacccttggcctcaagcaatccactcgcctcccaaagcgctaggatgacaggtgtgagccacagtgcctggcctgcgtgggtctgtttaatctccgggcctcttgctctccctttcttggtgatctccttggaccacatccctgtatcattctctctctcgaccctgagcccagggtccagagcagagaacgggatggggtctgggtaggggcccctcacttgcaaccaggatgttgggtgggggcgacgggggaccgaccttgggcaggaggcattgtgtccaccgcagcatctgtgctggcccccaggggggtggctcgcatggcccagggggacgtccaggaggtgctgcccatctaggcgctggcgggctgggagccccttgtcctggtcaatgcagagctgtcaaaaccggcctctgagtgatgctgaggggtcaggctgtctccagagagcaccggcgatcccggctgtgctgagagggagggctgagggctgcctggacgcccctgagatgaggcgactggtatttaggggatgcgtactctctggggcccgctggggcctgcagggagagctctcaccggtctcaactccatgccttctgccttgtgcttctggcccaagaggtcggggtcactgaccaccccgtgtccacctaaggcttccctggacacacagcagggagatgggcaatgagggtgggggttgtggccctgcctgtcacggtccccagcagtgcagatgaattagaccattgagccacagagcctggagggcagatgggtgtgctggtataaggagccccgggctctgtgttacaggtcatgtgttctcaccagtggccttgcaggaggggaacagccccttccccagggcctcgctctgctccccctgaaggatggggctgaggggacagcaggctctgggggcctttcagaccacatttgagtcaaaatttgacttccccatactctgcctgcttccacctcacccaactctcatccaggggtgacccttgttctagcacatgaggctgaggccagagagggcagggccttaggacacagcccagtcactgttctaattctagaggcaagccccttccatgtcctgagctctgtaatgcatcttttctttcatgagccttgcgatcaggcgatgtttattcagtggttaccacatccaggcatgctgccaggaggaggggagtcgtgggtgaagctgataggattcctgctggactcacagagcctgggttaatgacacattacccatgtttagataggaggtaattctgctccggtttcgacaagttgtaggaaaggaggaaaacatgctcatagcaggtgagcagcgtacacctgtcatgggagtgaggggtccttctgggggatggagagaccaagacgtgaacagtgagtgtggcacgcagagtgtcctccaccagaaacagtgtgggctgttctcagacctgagagtgagccaaaggaagctgggaccttgtcattcaggggacttgtgcaccgtgaagatttattggatgctatgtttaagaaaatggaaaatccggcccggcacggtggtttgcacctgtaatcccagcactttgggaggcggaggtgggtggattatgaggtcaggagttcgagaccagcctggccaacatggtgaaaccccgtctctactaaagacacaaaaaatcagccaggtgtggtggtggacgcctgtaatcccagctactcgggaggctgaggcaggagaatcacttgaacccgggaggtggaggttgcagtgagccgagatcgcgccacagcactccagcctaggtgacagagtgagactccatctcaaaaaaaaaaaaaaaaaaccggggaatctttagaaagcacagtggaaacagatgtctgtttttacaagcccatcactgcacagaatgcaatatgggagggtttcactaatggttaaccataaccacactccagcgtgagcccagccactaggcaatgtgctgataaggattctaagtggtttatgtggactcctcatgacctatgacacacatacgtttacagtggagtggaacgaggcaggagggcttctctttgtcatagtctaccagctctgcagaggtgtcagctacatccggattggctcagggagcggccgtcagaagacttacacgtgtttaataactgaggttgtgtgtgtgtggcagggggtgggtaactgtgatgagtttggtgtggcagagggggagccatagcctgtgaagctggaaagtgtatcaggtttggtcatcaacaggcttgaacatgaagtacaggaacgtgcatcttatttttggaagatggagccccgttgggggaatttgagcagtggagggtcacagccaggtaagatggtcagaagaggcctcggaagtgatgagagggatggactggagtagggatgggagccagtagggggccaggagggaggttggtgcagtgcacagacagggcgtcctcggtccccagctgagcttagactgtggggatggaccagcggacacgggtggagccgggtgaggagggatgtgggcagagaggtttggatttgttcactgtgtgtgaagcagaagagtgtgaggagcttttccactctctgccttggttgatgggaggaaccagtggggctgccgcaggacagacgacccgcgtgggagaaggaggctcggggagatgtttctaagacttaacttgctcacagagggaagcacaagcttccttcgagcctgggctttgttttcccaaacaggtcccttcactgactttcttttttgagacggagtctcgctctgtcgcccaggctggagtgcagtggcgcgatctcggctcactgcaagctccgcctcccgggttcacgccattctcctgcctcagcctcccgagtagctggggctacaggcgcccgccaccacgcccggctaatcttttgtatttttagtagagacggggtttcaccgtgctagccaggatggtctcgatctcctgacctcgtgatccacccgcctcggcctcccaaagtgctgggattacaggcgtgagccatcgcgcccagccaactttcctgttaatgagtagcactctttttttctttcttttctttccccctttttttttttttttagacatggtcttgctctgtttcccaggctggagtgcagtggcgtgacctcagctcactacaacctccacctcctgggttcaggtgattgtcctgcttcagcctcccaagtagctggattacaggcacgtgcaaccacgcctggctaatttttgtatttttagtagagacagagtttcaccatgttggccaggctattctcgaactcctgaccttaaatcatcctcttgccttggccccccaaagtgttaggattacaggcatgagccatcatgctcggcctcttttttctttttctttttttttttttttgtttttgagacagagtcttgctctgtcacccaggctggagtgcagtggcgtgatctcagctcactgcagcctccacctcccaggtgccagcgattctcctgcctcaatctcccagttagctgggattacagatgcgcgccaccatatccagctaaattttgtattttttagtaaagacagagttttaccatgttggccaggctggtcttgaactcctgacctcaggtgatccgcccgcttcagcctcccaaagtgttgggattacgggcatgagccaccatgctcggcctcttttttctttgcttaaaagatgaggcctgttgcccaggctggagtgcagtggcactatcatagctcactgcagccttgacatcgtggctcaggtgatcctcccacctcaggctcccgagtggctgggactacagacgtgcacctccacagccactacttatttttgtagcgatgtctatcagctggtgaatagagaaagtgtggtatatccttacaacaaaatattattcaaccgtagaaaggaatgaagtactcatacatgctacatgtgtgaaccttgataatatactagataaaagcagtcaggaaaaaaaggtcacatatgacgttatttcatttataagaagtatccagcctgggtgtggtggctcattgcctgtaatccagcactttgggaggccaaggcaggtggattgcctgagtttaggagtttgagaccagcctgggcaacatggtgaaataccatctctaccaaaaatacaaaaaattcacccggcatggtggcatgtgcctgtgatcccagctacttgggaggctcaggtggcaggatcgcttgagcctgggaggcagaggttacagtgagccgagatcacaccactgcactccaacctgggtgacagagtgagtccctgtctcaaaaaaaaaaaaaaaaggtattcaaagaaggccaatcgatagaggcagaaagtaggttaattgttgcatgggattaggtgggagtgattgcttgatgtaaactcggtttccttctcggtatgataaaaatgtttcggaatgagatagaggtgatgcttacaccatattgtgaatttactaaatgccacaaaatagagttgtatctcaataaaaatatatttgttgggccgggtgcggtggctcacgcctataatcccagcactttgggaggcaggcagatcaagaggtcaggagttcaagaccagcctggcaaaaccctgtctctactaaaaatataaaacttagccaggcgtggtggcatgtgtctgtaatcccagctactcgggaggctgaggtagaatggagcgagactccgtctcaaaaaaatatatatatatatgtaaatatatatatgttgggcatagtggtgcacacatgtagtcccagctacttgggaggctgaggcaggagaaccacttgaacctgggaagcggaggttgcagtgagccgagactgcaccattgcactcctgcctgggcaaaaagagtgaaactccatctcgaaaaaaaaaaaaaccacacacacacacgtagataaaatcaaatattctgtattccataaatatgtacaattattatttttcaattaaaaactcttaagctgggcacagtggctcatgcctgtaatcccaacactttgggaggcggagatgggaggctcttgagcccacaagtttgaggccagtttgggcaacatcgtgagatcccattgctacaaaaaaatttaaaatatatttttaaaaaactctaatacagtagtccccctttatctgtaattttctttctgtgttttcagttacctggtggtcaaccatggtccaaaaatattaaatagaaaagttaaggaatcataagttttttttttttttttttattgatcattcttgggtgtttctcgcagagggggatttggcagggtcataggacaacggtggagggaaggtcagcagataaacaagtgaacaaaggtctctggttttcctaggcagaggaccctgcagccttccgcagtgtttgtgtcactgggtacttgagattagggagtggtgatgactcttaacgagcatgctgccttcaagcatctgttcaacaaagcacatcttgcaccgcccttaatccatttaaccctgagtggacacagcacatgtttcagagagcacagggttgggggtaaggtcacagatcaacaggatcccaaggcagaagaatttttcttagtacagaacaaaatgaaaagtctcccatgtctacctctttctacacagacaccgcaaccatccgatttctcaatcttttccccacctttcccccctttctattccacaaaaccgccattgtcatcatggcccgttctcaatgagctgttgggtacacctcccagacggggtggcggccgggcagaggggctcctcacttcccagtaggggcggccgggcagaggcgcccctcacctcccggatggggcggctggcctggcggggggctgacccccccacctccctcccggacggggcggctggccgggcgaggggggaatcataagtttttaacaaatcaaaatatttctaaaaacctagagtaggcaggaaaggggaaacaacacacagcagaggagacaaacaaaaaggcacacctgaacacagtcatgcaccgcataacgatgtttcgctccactacacatttcatatgtgatggtatagcctatgtatgtagtaggttataccacgtaggtttgtgtaagtagactctatgatgttcacacgacggtgaatttttttttttcttttttttgagatggagtctcattctgtctcccaggctggagtgaaatggcacgattttggctcactgcaacctccgcctcccaggttcaagcgattctcctgcctcagcttcccaagtagctgggattacaggcatgcaccacgatgcccggctaatttttgtatttttagtagagacagggtttcaccatgttgagcaggctggtctcgaattcccgacctctggtgatccacccatcttggcctcccaaagttctgggattacaggcgtgagccaccacgcctggccaaaattttttaatgatggctttctcagaacatatccctgtcattaagtgacatacggttgtaatgtcatcagtgattacattaaatataagtgatcaaaaagagattacaagattggaattttttttttttgagacagagtcttgctctgttgcccaggctgtagtgcagtggtgtgatctcggttcactgcaaccactgcctcctgggttcaagcagttctctgcctcagcctccctagtagctgggattacaggtgcctgccaccacacctggccagtttttgtatttttagtagagatggggtttcaccatcttggccaggctagtcttgaactcctgaccttgtgatccacccgccttggcctcccaaagtgctgggattacaggcatgaacccccgtgcctggcctgttgtttatattttatcacattaaaaaagcagaaggatgaaaaatgtattatgcaaacactaatcaacagataatttcaccggcttgttagttgttttgtttttttgagacagggtctcgtccaggctgaagtgctgtggtgcgatctcggctcattgcagcctcgacctcctgtacccaagtgatcctcccacctcagcctctcaagtagctgggactacaggtgtgtgccaccacgccggactggttttattttttgtagagatggggcctcacaatgctgatctgactgactcgaactcctgagctcaagctatcctccccacttgccctcccaaagtattgggattacaggtgtgagccactgcacctggttatgcttcttttttattttttttctttctttttttttttttttcgagacggaatctcactctgtcgcccaggctggagtgcagtggtgcgatctcagctcactgcaagctctgcctcccgggctcatgccattctcctgcctcagcctcctgagtagctgggactataggcactcgccaccacgcccggctaatttttttgtatttttagtagagacggggtttcaccgtgttagccaggatggtctcgatctcctgacctcatgatccgcccgcatcagcctcccaaagtgctgagattataggcgtgagccaccgcgcccggcctatttatgcttcttaattttcccatgtcataagttcgatgtataatatttacattatcattcagtttaaaacattcactgtttttttttttagagacaaggtctcgctctgtcacacaggctggagtgcagtggcacagtcatagctcactgcagcctcagcagccttaacttcttgtgttcaaggaatcctccccactcagcctcctgagtaccacacccggcctttacgtctgtttttgttttttgtttttttgttattaactcattgattgttgagaagtctgttgctttatttccaaaatgggacgatattagtcatctttgagtcaggtgagtcccacaagttcccagcgtctcctcatggtctgtgttaggggtccaggctgactggggttcactggtgtccactgggggcagctcccgtgccttcagcagtcctgagtctccttctgctgagtgtggggtctgcgtaccccccgggctagtggatggccagagtggcgtagatgctgggctcagctggaggttccccttcctgggatggaggaggctcagttgccttccgtctaagggtcaagctgtgcagctgggcgtaggtcacatcctgggaggcttcagatgcagcagcctgcagcgggggagagtgagaggtaaggaacgtggtgggggtgggggaggcctgggggcctggagaggaaaggactcacctcagtgtccatctgcctgtcctcttccacctgtctgtcctttgtgtccaggaattccccagacagtgaggagggaggagaggccatttctctcctaggactggagtgtttcaccggggcatacgtcactgcctgggggtcttcatcgtgtgggctctgctggagagagacagtggtggggggtgtccttgagtccccctgacctcctggagtcaattttcctcactgttcccggggtgatccgattacatccctttcctgatggaatctcagggacgccctaaggccgtggagggtctggccgctccctccctgtggttctggcctctgctcctcactctgaccttgcccatttggctgcagcctcacaggccttcctgcaagagctcgctgctgcctgggggcctttgcacggctgtttcctctgcctgcaggggctcgtccatcagaggatcatgtgccccactctgtccaggcttctcagatgacagctgagcagacagccctccccttccattcagactggccccactgccccacactctctgccctttccctggtgtatgttccttacagcacgttgcactcctggacacgatgcatttatttgcattttgtctcccaccgtgaggtgagctcaggaggcgggggcggctttgctccctgctgtgtctgcagctcccatggggagccccatccacagtgagctccctgggaacactcgctggatgaatgaatgaagaggagcccaggggacggaggtggttcatttattcgtcatcctcctgaggcctggggagagctctaacaaccagacggccaaacagaggatgaggagcaggaaggggacccgggaggaggcccacgaggtcccaggacagcagaagagagtgaggtcacagcaggcgggaggcagcatgctggacaaggaggggtccaccgtgacgatgctgagagccgggggaaggaggacagagaagtcctgcaggattagatctggcaccaggaggcctttggtgcctgggacggggcgggatctcacctgactgtccagctccaccctgtcctcagactgtgtgtccttcacagcagcatctgctggggcagagcaaggggttcgtctcctggttctctgagacctctcagtcctgctggccccctgccctgctcccagatggggccaccgaatgcagggaggtcccacagtgtggggcaagaccatcttccacggagccccagacccttcccagcccctccctgttgctactgaaattttgggactcctgtctctccagcacccccatttgtcccctctcttcctcttacagaggttttcttcctggacgtcagcagctgggctggacctggaggaggacatgggagtgtgaggggcagtgtatgggctgtggtgggtgggagtctgtggtctttggggcagaattacctcctcagcaggcccctgtccttgggctctgtctccgcagcccctgcaggacgctggaaatcagtctttctctggtctgggtgaagatggacagagtctcagccctgggaacattagaactcccattctacacatgcaacttgagggaaagaaggaaaactaaaaatattcctgcatggatgttccaaatattttatgagatagaaaaaaactcccatgaatactgaagtttgtaaatgcgtattgaaattacgtgcccctggaaccggttttctaaactgacacccctgtgtgtttgggttccctctggctggtgccctgagcccaccctcggtcgacccatgggtcccccgcttccctactcaccagatgtcctgtgtttgctgtgacgctgacggaggaggaggaggaagaggaggaggaagagcagcaggacgaaggccaccgagaccccaatcaaaacctccaggtatcttcccagaccttgacatgaggacgtcaggagtgggaatgatgtcattgatgtgagcacctactgtgtgcaggcgcgagccaggtctttccttcgtgacctccaaccctcacaagcagtcgtgcaacatggaattgccacccgtacaacccatttcacagatgcacaaactgaggctcagagcagggagtcgcctgccccaggcctccagcgaggaagcggcagagctgggaagggagcccgggagtctgacctgcagcccttgttcctgcaccagagccgagacccggagctgcagggaaagagcctgaccgtcctgaaccacggccctgctcccctcccctgccccaggtcaccgtcactgctgcaggtgggacgggacaggcccctgtggaatcgggtctgggaggttccctgggaggcctcctctcccaggaggtcacagctgggggtcagagctgaaaggaactttcccacccacaggcctctctcctttacacttggagaaactgaggcccaggcaggggaggggcctgtccacatcaccacctccagaggagcctgaacctaggacagaacccacccctgcctcccctggaccccgcccatctcccactcagagcccctcactcaccattctgagggcctgaccctggggggttaaggggctggtcctcaggacctcctgggtcaggacagggaggtgaaggctggggctgtcttgccccccacatcagcccggctcctcctcctggctgggccccaacatctccctctgcctcgacccccgcccctcaccagcccagcctcagagcccctgggacacaagcccgtccttgaggggaggggagtgggatcctttgggagactcagactgccctgggggaggcggcgctccccaagaggcctcagtgactcaccaggtgtggagggcggccctgtgggtgggaggctggagcctccagagtgtcctggaaggagcacgggaggcgggtgaggggcgggggccgtccatggagtgcacccttccactcccactctcctgcttccgcccagtggattccctggaaccatctctctgcccacctggtgccttctgcatgccaggcaggggagaacgggtggccacgcctaggagaacccctgttggcctcctcccctctgagggctgggtgccctctggctaagcctccctcacagcctccctcggtccatcccagccgagagctctcctgggggcctgggccggagctgagcctttgagctcagagaggacggggtcagcgccctcacctgagaccatgagttccaggggctcactggggaaagacagcaggtgggggttggagctgcgtgagccgtagcacctgtaggtccccgcgtgggctgaggtcacaggactcatggggaattcagcctggtacttatgagctccgtacattgatctcagacgcagtgggggatgggctgccccttctttggtcagaaggaaagtgtcaaaatacccccgtgactgacacagcagggtcatgttctctcctgaggccactgtggggcccggctgtgctgacagggagacggtgtcatagatctgtcctggagagaagaaggatgggtgaggggctgccccaccttgctctgagctgacacctccccaggcctctccctgggaccctcagtgtctctgtccctgttttctctgagtctcccctccccccatcccctgtctctgtctgtctctccctcccttgggacccccacccctcatcccggccatcaccacctgggctcccccggcagggcctgtgcagagcctgggtccctgactgaacccgctgggctcctcacctgtgatcaggatgtccagggggtcactgggggccgaccactcggaggagaggttgtgtgcaccatagcacctgtactggcccccgtaggagcggctcacagggcccagggtgaagttggcctgggagagcccagcctggggctgctggccagggcgctggaggaagtcacgttccccctccttatacagaacaaatctgtcgtagccgacatcagagccacactggagggtcaggctctgcccaggggccaggacagggccctgcagggtcaggagggagggcttcctagacacgcctggagggaaagaggagccaggactgagagggctggttcctcccacgccccttccttctcccgtcctggccctgcaggtctcactgtctctcacgctctgagtctctgaccccagggcctccttctcacccggggctgtcttggagtcatttcagaggagtggggtctccctagccctggccactgtgcctgatctttcctcctctccctgagagctgggacctcacagcaaacacaccgatgccttcctgagtcctccccttccaggtgaacgtggtcaagggctcctcctcccatgtcagagcctccccatggggtctccctcatgccttcagcccgtccttcaacacatcactctgggtcctttccagattcagtcaccagccaaactccccacaacctgtcagctgccccgaaagtgtgttagacaaggccgtggctccctcacctgagggcagaatctccagggggtcactggggtgggaccacacccagggggtgtttgtataatagtaatagcatgtgaacctccacctgtggctgggggtcacggggcccacagggaacagggcctggaaccccccactgtggagctgctgtgagtccagggtccgggggagctggtgttctccttccttcatcagaacaaaatggtgatatcccttctgtgagccacatcggagggtcatattcccccctgaggccaccacagggctgggcagggctgagagggtgggtttgttgtagaatcctaggagagaaagaggcaccgtgttaaatggggctcccacctcccacatcatccccagggctgggctgtgagagggagacgcccctgagagccgacccccttcctgagggcagagcctggggctgggaccccagagtgtcctctcacctgtcatcaccagctccagggggtcgctgggctctgaccagcctgcagagctgtaatagtggcagcggtatctccctgcatggtgctgtgtcatggatgggatggagaatctggccttgttcttgggttccagtgggttatttctgtcccagggctctgggcttccctctttatccagttggtactcctgggcctccaggctcccctgacaccagatggtcacggggctcccccagctgatcacagagcctggctcagcccagagggtgggtttggggaagggccctagatggaaatcagaggctggatcccaagacatccccacgctcagatcccagctcccagccccaggacttccccatcatccccatcagtcacccagaactactgtctcctcccccagctgcccatgggtggccccctgtcccagtgaggagtagggacctgggacagctggggacagactcacctgcctgcatgcgggtcctggggcccagactcagccctggaagagagttccctgtgaggcatttgccctgaagcctgagcaggtccccgcccgggtgcctcctgagcttttgaggtctcctgatggaccagggcttgtgtgtggggtggggttcctccaagactcggatctccccctccccatcttgaaatctcaccaaggcagagcagggctgtgagggcgggcgtcatggcgtctcctcccggtgaccccgcgctctgcagagggatgagccctcagtgctggcaggacagagagacacacagggtgtggccgctcggaggctgggtccttcttgtcatggggttgtctcatcctcagcccacaggaagaggaactgccaccccaagaacctggctctgatttccccagggctgaagtgggggcaggcaccaggctctctgcaggcatttcagagagaaatggggtctccctgcccccgggccactgtctgcctgatttatctttatctcactgaggacggggacacagccgcaaatagacctggtgccttcctgagtcagcccctttcaggcgagggtgaccgtgggctcctcctccctctcagagcctccccatggggtctccctccctccttcagctcgtccatcagttcagcgttacggggtccttaccatggcagtcgtctctccagccctggagatgcttcagggaagacccaggtccatgctgcaggcagactcagatcagcagagacgcacctgacacctggctgtgtagtccaggctgagctgcgtgtggcagtgagcacagagaaatgcagggtctaccgtggtggctcatgcctggaatcccagtacttcaggaggctgtggcgggtgatggcttgaggccaggagcttcagacagtcctgggaaacagactgtgaccctgtttctacagaaaagaaaaaagtgagctgggcatggaggctcatgcctgtggtcccagctactcaggaggctgaggtgggaggatcacttgggcccgggaggcggaggcttcagggagctatgatcaccccttggccttccagcctgggcgacagagcaagatcctgtctaaaaaggagaaatagaggggataaagagaaatatatatatatatgtttcattgtaatctataatctgattctggggaaggtgagctgatttgtatttaattcctgattatcatctagggtttatgtgactttggacatgaatgtcacctctgagcctgctgtcatgaaccccactcatcacagtggctgtgggggtcagtggtgcccaggacatgggaggctcagccatggtgaatttccagaccagttcagacaggagggtggggacgggagaggatcctggtgctgggctccacagtcgaggaggatgattgacgcccccactcaagagcccacatcggctccaaataccatgaaattctccttgtgatacgtctgaaatatgcagatcatcacagccacaggcagagaaagaggaaaaacagttcctcacattgagacgcatccccttccatgagcagagttcaatgctgagtggccacaggtgtctgggaccaccgagcgtcattagggaggaggaggctcccacctccatgtgggacagaagaggaaccccacgtcctcccaggcagggaggggtcagggctctgggtgaggctggaagcggtggctccccctcccctgtgtgtgtggacaggcgctggggggtctctgctcactcactggaggccacggtcagcgctcagcccctcccctgtgtgtgagaaacagattcgatccacggtggtcagacatgggcgtctgccccacaggtgagtgtgaggctggcgttggtcccatcgctgctgggcacaatcttgagctgacactgagtttgggggagtggggcaggagcagcggcaacaatccccttcatcaggctgatgcctggacagccgtgggagaaaccctttatgaaaggccaggtgcgtgggaggagccgccccacaggaatgacaaccgtatgaggacaaaatagacagttgttgaaatgcattagacagacatcgtgaaggtgaaaaactatattaaattaacgccattaaaaaggaatttatgtctgggcatggtagttcatgcctgtaatcccagcactttgggaggtggaggcgggcagatcacttgaggctaggagttcgagaccagcctgggtgacatggtgaaaccccatctctactaaaaatacaaaaaattatctgggcgtggtggtgagtgcctgtaatcccagctactcgggaggctgaggcaggagaatctcttgaacctggaagatggaggctgctgtgtgctgagattgcgcccctgtacttcagctgggacaacaggagcgaaactgtgtctcaaaaaaaaaagcaatttactaaccatatatacctactatgcaaacataacaaaatcaaagcataatttaatccagggcaagacagctgaaataataaatatatacattgggataaaatattcatgaaattttccagactgtatcatggaaagaacagaaattgaacaatagaaaatattgatatatacacgaagttgaatgagaagaaagaacgtgtctgtcacggtttcagaatgaaagaaggaagaaggatgttagttcatgatatgcatgaagagctaatggttgaaatttttacagaactgaagagaaaacatcagtttataactaaattgaatatctcgatcatggtaaagtgaaaaccatgaggcattaatttaaaataatcataaaactaccagagaaaatgtaaattacccttgaatgaatgacaagttcatcgggactggagttccaaagagcaaacagcagccccagaagatacaggagaaacaaccacaagcgtttaactgtgaggagagagttcctgtgctgggcctaattattactattataattatttattattattattattattatcttttgagatgcaatttcgctcttgttgcccaggctggagtgcaatggcgcgatctcggctcaccgcaacctggcctagttattattaaaggaccgagttgcagtgtcagctgtggataaatcctagaacataaggagactcggggcactcgtgacccgtcaggtcaggcggtggccttatgaggaataaggagggcgttttcagtgtccttttatcaggtactatgataacaacagagaaagagagagattgagacagacagagagagacggagagacagagagagattgagacagagagagagagggagagggagacacacacacacacacacggagagagacagagacagagaagcaggcatcgcttgagctgcaaggctgcagacatgtttgcatctgggctctttctgaaagcaatactaaacaatgtaaatcagggagtggaataatgaaccccaaatggagaagatgagatgctactgtgaataagtcaacagtacatacaaaaaacgaataagcatagatctatctgtaatctgtgtatatacaagtatatgcatttctactaagaatctgaaagagcaaggaaatggattcgcgtctctggagcctccagaaaggaatgcagccacgttatggccttgattttgtcctaaaagactgtgagataatgagtttgtgttgctgaagctgctcaatacgtgtaatttgttatggcagcaatagcaaaccaatactaacacaaacagcctttgaaaagaaaaatagatgatatttcacacttttatttatttatttatttattttattttattttgagacggagcctcgctctgtcacccaggctggagtgcagtggcgcgatctcggctcactgcaagctccgcctgccgggttcacaccattctcctggctcagcctcccgagtagctgggactacaggcgtccgccaccacgcccggctaattttttactatttttagtagagacggggtttcaccgtggtctcgatctcctgacctcgtgatccgcctgcctcggcctcccaaagtgctgcgattacaggcgtgagccaccacgcccggatatttcatacttttaaatcagcaatctgtgaagaagagaaagttatacactttcactcaaccaaccacatgtccttaaaatttacaaagcatcaattgagacacagtggaggatttgaagaaatattgatcagactttgatagattaagtgaacaaaatattcgtgagggttgcatggcacaaatgttcaatctcatgcgcaaatatgatgtttcgattgtttatatattatgtaaatttgtatagaaacgtttctggaatatacatatagcaacaaagtgggaatgcatatttctttatatatatttttttgaaacaaggtctctctctgttgctccatctgaagtacaatggcactatcccagctcactgcagcctcgacctcctgaggcctaggtgattctgccacaaccatttcctgagtagctgggactacaggatcatgccaccttgcctggctaaatttttttaatatgtatttttttgtagagacgaggtttcgctatgttgcccaggctggtgtcaaactcctgggctcacgggatctgcccaccttggccttccaaagtgttgggattactggtgtgagccactgtgcgaggccaggaatacttatttatgaaaacatattgatcagaaatatctatcttttttttttttttgaaacgaagtgtagctctgtcgccaggctggagtgcagtggcacgaactcggctcacggcaatctccaccttccgggttcaagcgattctcctgcctcaggcttgtgagtagctagaattacaggcgtgcgccgccacacccagctaatttttttgtatttttagtagagacgggatttcaccatattggcccagatggtctcggtctcctgacttcttgatctacccgccttagcttcccaaagtggtgggattacaggtgagagccactgtgcccagccgtctctatcatttttacacagcaaagtaagcatccaaactgttactacaggtaacgtttcctgattagaagttcaattaaattagcagccaacaataagaagacatttagagaaaaagcaatactttggaaacaaataacattctaaatattcatgggttataggctggatgtggtggctcatgcctgtaatcccagcactttgggaggctgaggcaggtggatcacttgaggtcaggactttgagaccagcctggccaacatggtgaaatgctgtctctactgagaatgcaaaaattagctgggtgtggtggcatgcacctgtattttcaatgactcgggaggctgagacgggagattcacttgaacccaggaggtggaagttgcagtgagccgagattgtgccactgcactccagcctgggtgagagagtaagactccatcgcaaaagcaaaaacaaatattcatgggttatagaatcacacaacattaaattgatagaacattaacgaaaaatgtcaatgaaattataacatatgaacgtttgtaggatgtaaagtaagagagtgagagagagagagggagcacaacaattaccaaatcaagatggaaagaggcaccactacccatcctacagacataaaaggactagtgaagcaaaactaggaatctatgctaagatgttttacaactcacatttaatagaaaatatcttgaagtatacaaactaccaaaatttactcaagaacaaatatatagtgtaacatttcctatttttattaaagaaattcaactggctgggattggtggctcacacctttaattccagcaccttgggaggctgaggcgggcagattacctgaggtcaggaattcaagacctgtctggccgacatggtgaaatcccacctctactaacaatacaaaaattagccaagtgaggtggcgcatgcctgtaatcccagctactcaggagggtgaggcaagagatctgtttgaacccaggaggcggaggttgcagtgaggtgagatcacaccactgcattccagcctaggcgacagagggagactctgaaaaaaaaaaaaaaaaaagaaaagaaattcaacctacactcagaaatctttccatagggaaatctggcctaaatgggtacactgttgatttctaccaaatatttgagaaagtaagaatgacatggaaactctagctatcattcagttctcactaggctcatcgacttcttcattccagtccatgggttcttatggacacatccagccagttcagtccaagttccttagtggggcagcagtttggtgctgttggtgttgctggaagctctttgacctcctttggaacagaaatatcaaacagtggtagcttgccccaaagtagagtggttgattctgcctttacacaggatacaagatccctaaaaacacaattatctcaaggtccttcaagcgctcagttcgaccctttgagaagaagcccaaccatggaacaaggagtgcagaccgcctgggcccacggacctgctccagcacctgttgggagaaggagtcctgtatcaaccaggcctttgccatctaccagccaaaaagcaatagagaatcaggagcagaggtgagctgaagcgcacaacgttccaaggccagaaaatgagcaactcagaaatgaaacaagagacaagcagctccaggtgctccttcagcgccaaggagagggcgtgggggtcatggggtggcaggggaagatttggtattcggcgagatgggccaatgaaatttgagaatttttttttttttttttggagacggactctcgctcggtcgctcaggctggggtgcagtggcccgatctcggctcactgcaagctccgcctcccgggttcacgccattctcctgcctcagcctccccagtagctgggactacaggcgcccgccaccacgtcaggctaatttttttgtattttcagtagagacggggtttcaccgtgatctcgatctcctgacctcgtgatccgcccgcctcggcctcccaaattgctgggattacaggcgtgagagaaagagtttgactttgaaagtgcaaatgcccaattcaacaaggaagagatgggcagagagtttcataataaacttaaattaaaagaagataaacttgagaaagaggagaagcctgtaaatggtgaagataaaggagactcaggagttgatacccaaaacagtgaaggacatgctgatgaagaagatgcacttggacctaattgcttttatgaccaaactaaatcctcctttgataatatttctggtgatgacaatagagaacggaggccaacctgggctgaaggaagaagattaaatgctgaaacatttggaatcccactttgtccaaaccgtggccatgggggatacagaggcagagggaggtcttggtttccatggtggcagagggcgtggtggcagaagtggtaccttgaccaccccttgaggatttcgcggcggattcagaggaggttccaggggtcgggagtttgcagattttgaatataggaaaagcacagcctttggcccctaaatagtctgaattgatagtactgctctctgaaagaaagacaacaaagctgctgcatagtctacaaacaagtctttgaaaacaggtgaatttctagctcttcatggtactggaaactgatttcagtctttgcgaagaacgaagaagtgaattggctgtatgtttgccatcagcactgggtttttgttttttgtttgtttttctgtttaatttcagagataaaatgcagttagttttcgggggaggaagccttatcttaagacatgaggattaaatatatttggaatagcagaaggttaaataatttcttatgtatagttaaactaaagcagtacttcagtgggacttataagtattgtgtcatcactgaaaggttttttttttttttttttaatcactgaattgtatttggtaattccaggttgcctgcagatagggccgtgatactgtgttctgagccaagaagggagggtgtgtgtgtgtgtgtgtgtgtgtgtgtgtgtgtgtatctttctcctcctttcttttggggaatcttgtaatattaaatagtctatttcatcaattaattagggtgctggatggtagagaattttgtcagtcaactaggtacacacggtaaatactgtttcttaggcaaacgaacttttttatacagttgtaaaattccattatattccaatgccaaagaaacattaaaaactttgtaaagttgtataaaaagcaactaattttttacaaaatagatatcctaaagttagccaaaaaaaagagaaaagggcaaagtgatcatttttggcgtagggtaacccttagtttcttccctggtagtaatttcccaccaggcagatcgtctaaccccaaatcacctaaaagtgcaggcccaggacgtgcttatctgcccagtgagtcacctggaggggtggtgatgggggctgttgatgacacgctcctttcctttcccagcccgtgtgttctacctctgaaaagacatagcattttcatttgcagagcccattatagaaaaataagaacaaaaatattagaaggaaaagacatagcatcatttagtgttcattcatatgaatatgtatattgtctacagctatctatatctctgttttatatctatgtctgttacaccatcagagagcacctaaagtgcagagtctcatccacaaactgtttcttgcatctactgtaagaggccattccgatgctctgtcagccccagcagcacccaaccactacatggcacgcatcctatctcagatcatccccaggatatcacgtggccctgttctcattgccccactgatttcatgggcgtgcaggtccctcgatctgagattaagtcatgagatgctccatttaaacaggcgggagcctctgattcctggcggagagccacagtgagcccagcagaacccatctgagcgccagcatccagcccggtcaggaggatttgctgccccctcctggtggaatgcgcgccatgtcgtcaagcggccaccagatgactcgctcgctggtccactcaaaggcatcacatccagagcgctctgctggtcacaggtgagactctcagcgacagtggtggctgcttggtccttggtaagagggagtcgctggtgttggttccatgcatgtccttttttctttgattcttttattttattttatttagagacggagtctcactctgtcgcccaggctggagtgcagtggcgcgatctcggctcactgcaacctctgtcccctgattctcctgcctcagcctcccgagtagctgggattacaggcaccttccaccacacctggctagtttttgtatttgcagtagggacggggtttcgccatattggccaggctggtcttgaactcctgacgtcagataatctgcccaactcggcctcccaaagtgctgggaatacaggcgtgagtcactgcgcctggcagcatgtcctttttttcttgctccatggccacgacactcacgggcccctccagcacgcactggggctgctgacacagagctggctgaagctcacggcattaacccagtcatcagcggatccttagatctcctaaccccagctgtgggcgctcctgctagcttctcaggagaagctcctggtcgagagcagacgtttctcctgtcctcctccagcctcagtctccggcagtttctgtgtgcctgggccttgagggtgggtttgtctccgtgtttctgtccccgctcctcatggcagctgcattgtattgagtaggtttgtttgatggggacgggttttctgtccctattccaaatttgcatatctctaatggtatttgtctaggatcacagtccaggattgttctctgcactcctcctagggtagagggattttatgatccaccttcttccggccacaatgagtcattacctgggatctgaggtgggcagaattatctgagcctcttccaatggcttatgtcttttcctccatgtgagagaaacacctgggtgggaaatgagatttcaggccatgcacagtggaagctctttctgtctgatcactaatgtggggtctccatcttgctccaaatcagttttgtgaatgcacggttgagacccaagaaaaagagcctttgggtgagtgcacagcacccctctgtcttaggtccccagatatatctcaatttgggcttcttctggaacatgaaactatttactttgagtttcctacgaaaacatagtgctggccttagacttcctatcctgaaaccccacgtctatttcccaacctcatgcatggaaaagtgctcgaatctccataggatcagcaagatctctatagaatctccatgggccctccacaggacctccataagatctcaataggttctccacaggttctccataggttgtccatagaacctccacaggacctccataggatctcaatagaacccccacaagacctctataggatctcaatagaaccctcacaggacctccataggatctcagtagaacccccacaggacctccataggatctcaatagaacccccacaggacctccataggatctcaatagaaccctcacaggacctccataggatctcagtagaacccccacaggacctccataggatctcaatagaaccctcacaggacctccataggatctcagtagaacccccacaggacctccataggatctcaatagaacccccacaggacctccataggatctcaatagaacccccacaggacctccataggatctcaataggacatccacaggacctccatagaatctcaatagaacccccacaggacctccataggatctcaatagaacccccacaggacctccataggatctcaatagaacccccacaggacctccataggatctcaatagaaccctcacaggacctccataggatctcaatagaacccccacaggacctccataggatctcaatagaacccccacaggacctccatagaatctcaatagattctccataggacctttgcaggacatccataggttctccgtggatcttcataggacctcgactggatctccataggatcttcacagggcctccgtaagttcttcacaggatttccagagttgccacaggatctgccactgcagggaccagccggcatcctctacatcccaagatgctggaaatgaccacgtggtgatagtggttatggatttcctacaggagaatgtgtgaaaccatgttcctgggcaaccctgcggagtcccaatctccattcagatcctccaggggccaggctggagggggtgtctggtgtgtcactgtgtctgttcacacagaatgggggcttctgcagtaataatgggaaaccagcccagagatagaggcagggattggagttatgctgtcataatccatgaagtgctgagctgaggaaaccagctgagcttggactgtagcgttggacaggagacattgataaaaaggactctgtggtagaatggtgtggatttgttcattgtgtgtgaagaagaagatgctcagggaatgaaagctcttccattctctgacttggttgacaagaggaaccaatagggccatcacaggagcaatgaccccatgtgggaagcagactgaaggagatgtattaaaaacagttaactaagtcagagagagaaacagagcctcccaatacctggaaagcatggtttgttcctcccaaacttcctccctctgacttctttatttctctacgtagcagcacctcttcatttctccatcaaaggctctgagctgtttgagttcctcatatattctgatgatcaaacccttgttagaggaataggtaacaaatgtttctccctgcctctgtaggtcataacaccgttggttgtttcctgagctctgcagaagctttttagtttgatacacccatttgtctatttttgaattcgtttcctatgcttttgaggtcttactgatagaatgtttgcttagaccaatgtcttgaagcgtttcctctgtgttttcttctatagtttcatagtttcaggtcttactttgggtcttattctgtcttgagtagatttttgtatatcgtgagagacagaggttgagttttgtttttttgcatatggatatgcagttttgctagcagcatttattgaagaaactgtcctttacccaatatatgttcttggcatgtttgttgataatcagttggctgtcaatttgtggatttatttctaggttctttgttctgttccatttgtctatgtgtttgtttttaagccagtgccttactgttttggttactatagctttgtagtgtattttgaagtcaggtagtgtgatgtctccagctttgtttttttttctctacattgcgttggctattttgggtattttatggctctatattaattttagaattttttatatttcagtgaagaaagacacttgtatgttgataggaattacaatgaatctgtagatagctttgggtcctatggtcctttttgtaaacatttattgtttcaacgtgtgaacatgaggtatctttccagttttttcgtgtcctctttaatttttcttagagctttataattttatttgtagaggtttttaccttgtcagttaaatttattagcaggtcttttattgtttgtggctattataaatgggatttcattcctgaattctttttcagccagttctgttcttcagggtcaagcatcatgtaagttcccatgtaggaaaggaatccggaatgaacagcagctgcacacaaatgcctttctctgatttccacctcagaggggtccaggaggtgatcaggcacatggagcattgtcacatttggtaccaatcccagtgtgatccctaaaacaccacctgattgggttgagcctcatctctgaaataaccaagccctgtgtgatccctaaaccaccacctgattgggtggaacctcatttctggaataaccaagccctgtgtgatccctaaaccaccgcctgattggatggaacctcatctctggaataaccaagccctgtgtgatcatcctaaaccaccacctgattgggttgaacctcatgtctgaaataaccccaaggccatgttggtgtccttcatcccagttctggtggtttcaacataatgaaatcagaaagttatatggccacttaaaaatgtcaagtgcatgtcatgaagtactggacaaggtgtttccctttctgaggcccattcttacctgggtaagtggctcattgtctgcgtggactcaggtgaggttgatcaggcaggtgggtgtcatgttgtgaatgaaacacaaagtcaacctgtgagatcattgctctgacaggtcaagaaccacctggtttgccatttagtggccagtgcagcctgtggcattcaccaccacacttcaatctcagctccctaaatggcatgacaaataaagatagataggtacaaaaacagagatatgctattccctggttaaaatggctgttatctctaagacaaaaattaacagatgctgtcaaggatatggagaaaagaaacccttctaccttggtgggaacgcaagttggtgcagccaatatggaaaacagcatggaggttcctcaagaaactgaaagtagaacaaccacaccatccagtaatcgcacagatgggtatatttccaaaagaaagaaaatcagtatatcaaagaggtgtctgcattgccatgtttattgcagcagtattcacaatagccaagatatggaatcaacctatgtccatcaatggatgaatggataaggaacatgtggtctatatacacaatgaaataatattcaggcataaaaagaaggaaattgtaccatgttcagcaacacagatgaatctggaagacattatgttcagtgaaataagccaggcccagaaagaggagcatgttctcactcacgcggaagctacaaaagtgggccttgtgatggcagagagtagaatggttgtcaacagaggctggcaagggagtgtggaggacagggatggagagaggttggtggacgggtgcagaaatacaggtggagagaaggagtaagttccagggcctgagagctcagtagggtgaccatagttagcaacagattattgtattttccacatgagtgagaaatgaagatttggaatgttcccagcacagaaattataaaagttggccaggcatagtggctcacacctgtaatcccagcactatggaaagccgacgctggtggatcaccttaggtcaggagttcgagaccagccagagcaacatggtgaaaccccgtctgtaataaaaatacaaaaattagcgaggtgtgatggtgcatgcctgtaatcctagctactcaggaggctgagacaggaaaactgcttgaacccgggaggcagagtttgcagtgagccaagatcctgccactgcacgccagctgggcgacagtgcaagactctgtctcaaaataataaccataataacaaatgttcagggtgatgaatgtcctgggaacctttattggatcgttacacattgcatggatgaatcagattaccacatgctcccaagaaacatgtatgattattccgtatcaaattaaaattatgtgatttaccaataactcgaagtggattgagggtcaccaaatgaaagtcagcgttccagtgcccgcgtccagtggtccttggagtttccatgttgaacagaaccctccagtatttcctgatgtgcaagcactattttggattacataatctatttcctttatttatggggtctattttgagtttgcctccctagaaaataaatgctgcctctttttgagcttcatgtgcacaccttctttttatactcttgtttctttactcaacatcatgatggaaggttggtttgcattgctctttgtagattttgtctgtgcctctgcacggcctcgtagtatcccttggtggaattgaaccacatatgtttcctttgttttagatgtatttttgggttttatggctgttgtgtaatatgagcagcagtcctgtccatgttgttgtgaatgaaacctcaccatatgaacacattttcctctaggttctgtgctttgtgttcatagctgtgtgtctcttctttttttttttcttttttttttagatgaagtctcgtactgtcacctgggccggagtgcaatggcgccaccttggctcactgcaccaactggcgccaacttgcttccgtctcccaggttcaagcaattctcctgcctcagcctcctgagtagctgaaattacaggcacctgccaccacgcccagctaatgttttgtatttttagtagagacggggtttcactatgttggccaagctggactcgaattcctgaactcgtgtccgcccgcctcagcctcccaaagtgctgggattacaggcatgagccaccgcgcccggccatgtttcttctttttcactgggtacttctgatattttccccaaattgattcaagtaatttgcagtcctaccatggatgtattggatttctacgtgagccctactacctctgacatttgatattgtcattttcatcatgtgaaatgaatacctcaacattgatccctctcttcaggaatgatcgacagatagtccagaaagcataggctgtagattttgttccagaacctcctgggatcatcagattgaacacatgagggtgggagactgccatacaagctgggaaggaggaatcagatgatattgtcatgaattcctcaagagttagtgtttgctggcctccaagaggcaaggatctctgggaacttaagacagagaagcacttcacactcacccatgagctcttttccgtgggtctcaactgggcattcacaacatagattggaagtaaggtggagacccaaaatttgtgatcagacatgattaccttccacagtgtgtggcctgaaatctcacccccctctggaggtcctagattgtcctccagagccttctgggatcatcagatctgtccctgaggctccaccacgctgaagggtgcattgtcctctccgctgttcacctcccggctgcatcttgggggtttctctggctgtgctgagcctcaaataacagaatcccgaggaacaccaggaccaagcctgccatgcccatgcggatgagattctccactgtgtaatccttggcgtgtgaggctggggatggtgggcaaagaggtcacagaggtccgggcagatcaacttcacccaggacccctggatgcccaacccagggcaccccccatccgccattgacagaacctgaccctctgtgcccgccccataactgtctgacttgttttgtgatggggtgagggtctcagctcctcctgagaatcaaaacagaaggggagagccctgagccagcctctcccctgggctctgcgttcttattcttccaggcctcatgacgtggcttttacggagttcctcaataaaccctccctctcctgcagcagggctccctccagtctcctcatgaaactatttcagttttcctgtgttctatgaatttcaacgctgctcctgagccatttcctccctcccatgggctggattctccaccttcactcccttctttcctagtgtcccagagctctcctgggtgcagagcctgagctgagcatttgagctcagagaggacagggtcagggccctcacctgagaccacgagctccagggagtcactggcctgaccctggggggttgaggggctggtcctcaggacctcctgggtcaggacagggaggtgaagcctggggctaccttgctccccacatcagcccggctcctcctcctggctgggccccaacatctctctctgccttgaaccccccactcttcaccagcccagcctcagagcccctgggacacaagcccgtccttgaggggaggggagtgggatcctttgggagactcagactgccctgggggaggcggcgctccccacgaggcctcagtgactcaccaggtgtggagggcggccctgtgggtgggaggctggagcctccagagtgtcctggaaggagcacgggaggcgggtgaggggcgggggccgtccatggagtgcacccttccactcccactctcctgcttccgcccagtggattccctggaaccatctctctgcccacctggtgccttctgcatgccaggcaggggagaacgggtggccacgcctaggagaacccctgttggcctcctcccctctgagggctgggtgccctctggctaagcctccctcacagcctccctcggtccatcccagccgagagctctcctgggggcctgggcctgagctgagcctttgagctcagagaggacggggtcagcgccctcacctgagaccatgagttccaggggctcactggggaaagacagcaggtgggggttggagctgtatgagccgtagcacctgtaggtccccgcgtgggctgaggtcacaggactcatggggaattcagcctggtacttatgagctccgtacattgatctcagacgcagtgggggatgggctgccccttctttggtcagaaggaaagtgtcaaactgccaccatgactgacacagcagggtcacgttctctcctgaggccactgtggggcccggctgtgctgacagggagacggtgtcatagatctgtcctggagagaagaaggatgggtgaggggctgccccaccttgctctgagctgacacctccccaggcctctccctgggaccctcagtgtctctgtctctgttttctctgagtctcgcctccccgcccatcccctgtctctgtctgtctctccctcccttgggacccccacccctcatcccggccatcaccacctgggctcccccggcagggcctgtgcagagcctgggtccctgactgaacccgctgggctcctcacctgccatcaggatgttcagggggtcgctgggggccgaccactcggaggagaggttgtgtgcaccatagcacctgtactggcccccgtgggaggggctcacagggcccagggtgaagttggcctgggagagcccagcctggggctgctggccagggcgctggaggaagtcacgttccccctccttatacagaacaaatctgtcgtagccgacatcagagccacactggagggtcaggctctgcccaggggccaggacagggccctgcagggtcaggagggagggcttcctagacacgcctggagggaaagaggagccaggactgagagggctggttcctcccacgccccttccttctcccgtcctggccctgcaggtctcactgtctctcatgctctgagtctctgaccccagggcctccttctcacccggggctgtcttggagtcatttcagaggagtggggtctccctagccctggccactgtgcctgatctttcctcctctccctgagagctgggacctcacagcaaacacaccgatgccttcctgagtcctccccgttcaggtgagcgtggctgagggctcctcctcccatgtcagagcctccccatggggtctccctcatgccttcagcccgtccttcaacacatcactctgggtcctttccagattcagtcaccagccaaactccccacaacctgtcagctgccccgaaagtgtgttagacaaggccgtggctccctcacctgagggcagaatctccagggggtcactggggtgggaccacacccggggggtgttcatataatagtaatagcatgtgaacctccacctgtggctggggttcacggggcccacagggaacagggcctggaaccccccactgtggagctgctgtgagtccagggtccgggggagctggtgttctccttccttcatcagaacaaaatggtgatatcccttctgtgagccacattggagggtcatattcccccctgaggccaccacagggctgggcagggctgagagggtgggtttgctataggctcctaggagagaaagaggcaccatgttaaatggggctcccacctcccacatcatccccagggctgggctgtgagagggagacacccctgagagccgacccccttcctgagggcagagcctggggctgggaccccagagtgtcctctcacctgtcatcaccagctccagggggtcgctgggctctgaccagcctgcagagctgtaatagtggcagcggtatctccccgcatggtgctctgttatggatgggatggagaatctggccttgttcttgggttccagtgggttatttctgtcccagggctctgggcttccctctttatccagtcggtactcctgggcctccaggctcccctgacaccagatggtcacggggctcccccagctgatcacagagcctggctcagcccagagggtgggtttggggaagggccctagatggaaatcagaggctggatcccaagacatccccacgctcagatcccagctcccagccccaggacttcctcatcatccccatcagtcacccagaactactgtctcctccccacccagaactgctgtctcctcccccagctgcccatgtgtggcccttgtccctagtaaggatgagggacctgggacagctggggacagactcacctgcctgcacgtgggtcctggggcccagactcagccctggaagagaattccctgtgaggcatttgccctgaagcctgagcaggtcctccccgccctggtgcctcctgagcttttgaggtctcctgatggaccagggcttgtgtgtggggtggggttcctccaagactcagatctccccctccccatcttgaaatctcacctaggcagagcagggctgcgagggtgggggtcatggcgtctcctcctggtgaccccgggctctgcagagggatgagccctcagtgctggcaggacagagagacacacagggtgtggccgctcggaggctgggtccttcttgtcatggggttgtctcatcctcagcccacaggaagaggaactgccaccccaggaacctggctctgatttccccagggctgaagtgggggcaggcaccaggctctctgcaggcatttcagagagaaatggggtctccctgcccccgggccactgtctgcctgatttatctttatctcactgagagctaggacacagcagcaaatagaaccagtgccttctggagtcagcccctttgaggcgagggtgactgtgggctcatcctccctctcagagcctccccatggggtctccctccctccttcagcccgtccatcagctcagcgttacggggtccttaccatggcagtcgtctctccagccctggagatgcttcagggaagacccaggtccatgctgcaggcagactcagatcagcagagacgcacctgacacctggctgtgtagtccaggctgagctgcgtgtagcagtgagcacagaggagaaatgcagcgtctaccgtggtggctcatgcctggaatcccagcacttcaggaggctgtggcgggtgatggcttgaggccaggagcttcagacagtcctgggaaacagactgtgaccctgtttctacagaaaagaaaaaagtgagctgggcatggaggctcatgcctgtggtcccagctactcaggaggctgaggtgggaggaccacctgggcccgggaggcggaggctgcagggagatatgatcaccccttggccttccagcctgggcgacagcgcaggatcctgtctgaaaaggagaaatagaggggataaagagaaatatatatatatatatatatatgtttcattgtaatctataatctgattctggggaaggtgagctgatttgtatttaattcctgattatcatctagggtttatgagactttggacatgaatgtcacctctgagcctgctgtcgtgaaccccactcatcacagtggctgtgggggtcagtggtgcccaggacatgggaggctcagccatggtgaatttccagaccagttcagacaggagggtggggacgggagaggatcctggtgctgggctccacagttgaggaggatgattgacgcccccattcaagagcccacattggctccaaataccatgaaattcttgtgatacgtctgaaatatgcagatcatcacagccacaggccgagaaagaggaagaacagttcctcacattgagacgcatccccttccatgagcagagttcaatgctgagtggccacaggtgtctgggaccaccgagcgtcattagggaggaggaggctcccacctccatgtgggacagaagaggaaccccacgtcctcccaggcagggaggggtcagggctctgggtgaggctggaagcggtggctccccctcccctgtgtgtgtggacaggcgctggggggtctctgctcactcactggaggccacggtcagcgctcagcccctcccctgtgtgtgagaaacagattcgatccacggtggtcagacatgggcgtctgccccacaggtgagtgtgaggctggcgttggtcccatccctgctgggcacaatcttgagctgacactgagtttgggggagtggggcaggagcagcggcaacaatccccttcatcaggctgatgcctggacagccgtgggagaaaccctttatgaaaggccaggtgcgtgggaggagctgtcccacaggaatgacaaccaagatacgtgaggaaaacacagacagttgttgaaatgcattagacagacgtcgtgaaggtgaaaaatagtaaattgaattaataccatcgaaaagtaatttaataaatatatacacctactatgtagccataaagtgaaaaatttgaccgggcgtggtagctcatgcctgtaatcccagcactttgggaggccgaggtgggcggatgacctgaggtcaggagtttgagaccagcgtggccaatatggtgaaaccctatctctcctaaaaatacaaaaacaattagctgggtatggtggtgcacgcctgtaatcccagctactcgggaggctgaggcaggagaatctctggaacccaggaggcggacattgcagtgagctgagatggcaccactgcactccagcctgggccacacagcaagactctgtctcaaaaaaaaaagaaaaagaaaaagaaaaaaagaaagtaaacaacttctaaagcgattcaagcaccagaagggttcaaatgaaaatgagaccaaaggaagtaaataaaaaagaggagggaatttgtgagaacacattttaaagggtccattttcaaggcatgatatccaagtattggcagccagtctgcggatgtaacaaaccgcacggctcatgctcctagcaaatcacaataagtgaacagaatggcggggggttgtgggggaggaggcggtcagcccataaaagggaaaaaaattttgttattgggaaatcgcaacttaagcggggaaggggacggggtacaaccttataagggggataatgaaactcaggcgaagtctgggaagattgtaacctcatagtactcgaccagtgaggaactggggaagggatagttgagtgccaagagataaattacctgctgtgactgccccggctatgcctacctagcagacatccaattttgcaagaccctgttaaaagtctcactttcaggcgggacatggtggctcacgcctgtaatcccagcactttgggagtcaaggcgggcggatcacgaggtcaggagatcgagaccagcctggctaacacggtgaaaaccgtctctactaaaaatacaaaaaattagccgggcgtggtggcgggcacctgtagtcccagctgctcgggaggctgaggcaggagaatggcatgaacccgggaggcggagcttgcagtgagccgagatcgcgccactgcactccagcctgggtgacagagcgagactccatctcaaaaaaaaaaaaaaaaaaaaattcgcagcagggtctgctggggcaaagcaaggggttcgtctcctggtaagtttccctgggacctctcagtaccacctccccctgtcctgctcccagtgggactgctgagatctagggagcgggtgtgatgtccctgaggttccacagtatgaagtgaaccatgttcccctgagccccagacccttcccagccccttcctgttactagtgaaactgcagggtccccatctgcaccccaggtgcaccccctcttcctcttactcactgaggttttcttcttggatgtcagcagctgggctggacctgggggaggacacgagagtgtggtgtggtggagtgtgggagtctggggtctttgggcagaattacctcctcagcagacccctgttcttgggctctggtcccacggcccctgcagggtgttggaaatcagcctctctctgggctaggtgaagaaggacaaagtctcagccctgggaaccttagaaccacccacccagtacatgcgactttaggggaaaaaatgaaacttgaaaacacacccatatatatatatatatatatatatatttttttttttttttgagacaaggtctcgctctgtcgcccaggctggagcacagtggtgcgatcccagctcactgcagccttgacctcatagggtcaagtgatcctcctgcctcagcgtcttgagtagctgggaccacgggtgcacaccaccaaacctggcttatttgcatttttaattttttttgtagagatggggtctcaccacattgcccagagtcctctgaaactcctgggctcaagccatccacctgcctcagccttccaaagtactgcgattacaggcatagttgttttaaatactggatacacttaaaaaggcccgaagacgttgggccgaatggctcatgcctataatcccagcactttggaaggctgaggcgggtggattgcttgaactcaggagtttgagaccagcctcggcaacatagtgagaccccccatctctcccccgcaaaaaaataattagcctggcgtggtgataggggcctgtagtcccagctactcaggaggctgaggtaggaggatcattgaggatcttgggaggtggaggttgcagcgagccgagatcacaccactgcactccagcctgggtgacagagccagatcacgtctcaaataaaataaaataaaaagctcaaagaataaattacttgcacatacactcatatttattctcttctttctagatttttcagctgggactttctggagctgtttttctaagctgactttcttgtgtgtttggttcccctttggttggtgccctgatcccaccctcggtgggcccacaggttcccccagtccctgctcacccaatgtcctgtgtttgctctgacgccgacattggaggaggaggacgagcggcaggacaaaggccactgagaccccggttacaacccccaggtatcttcccagaccttgcgcgtgatgacgtcgggaatgaggatgacatcgctgatgtgagcacctactgtgtgcaggcgcgtgctgggtcttcatgagctctaaccctcacagcagtcgtgcaacgtgggattgccaaccccccaacccatttcacagatgcacaaactgaggctcagaggggggaatcgcctgccccaggccccccagcctggaagaagcaggtctgggaggggaacctgggaccttgtgttttccccagctgtcctcctgctgccccaccaggtggacacctgcttcctgctctgggtcttctcatctgacagcaggggcctgtcttagtgtctccatctggggctgtgtcctccttacaaccctcccttccccagcacagcagggcctgggggagggagtgggctgtacaggacggaccctgcattgctctcacccccagcccagccaggtccatctcctactctgccaatccctgaccttcccatgcagagcctttgaccacagactgaagggctgcactgtcggcttctcggcttctgaggttttggtactcggactagcttccttgctcctcagcttacagacagtctattgtgggacctcaccttgtgatcgtgtggatcaatactccttaataaactcccctttatatatacatctatcctgttagttctgcccctctagagaaccctgactaatacatgtttctgaaatacgcagccatagaaggaaatgagaaatgaaacttcctgacacaggcaggaaacctcaggaagcagcgaggtcagagctgagttggcttctggtgacttgcaatgtcagggaatcactaaaagggaggtttccgcctctatatgagacagaggagaaccccagggccctcacagtcagggaggggttggggttttgggtgaaagtgggaagttgtggctcctcgtcccctgtgtttgtggatggcactggggtatctctgctcattgactcaggtttatggtcagccctgagcctccccctctgtgtgtgtgaaatagattcattgtagagttgtcagacatgaggttcacactggaccctcccctgctggttacaggcctgagcagactcacaagacccgggcaggtggtgccgtcctcctcttttcaagcctaacgcccagtgcagccctggtagaaaccctctctggcagatgaggcactgggagatgagtgtccaagaatgagaagaaagaggaatcatcctaatgataaaaagtgctatgactggctgcctgcgatggctcacgcctattttcccagcgctctgggaggccgaggtgggcagatcgctggagcccaggagttcgagaccagcctgggcaacatggtgaaaccccatctctactaaaaagacaaaaatgaactgggtgtggtggtgcacacctgtagttccagctacttaggagcctgaggtcgaagatcgcttgagtctggcaggcggaggttgcagtgaactggggtggtgcgccactgcactttagcctgggtgacagagcaagaacctgtctcaaaaacaaacacaggctgggcgtggtggctcacgcctgtaatcccagcactttgggaggccgaggcaggcagatcatgaggtcaagagatcgagaccatcctggccacacggtgaaaccccatctctactaaaaatacaaaaaaaaaaaaaaaaaaagattagctggttgtggtggcgggcacctgtagtcccagctactcgggaggctaaggtaggagagttgcttgaactcaggagacagaggttgcagtgagctgagatcacgccactgcactctagcctgggtgacagagtgagactccgtctcaaaaaataaataaataaataaataaaaacaaaaaacaaaccaaaaaatcaaacacaaagtgctatggttgacaatccacactcactaatgaggattatcatggtcaaaaggagtactaggaatgtgtgagacccatcttaggttaaacatgtttaaatatttgagaaatacagaggacattgaatttctgaggcaggattatatgatttttttttctacagcagaatgaatattatataaaataattagaagacatagaaaaatcagatttaatgaacacaatcaaaatactcattccttcgaggacaagacacagtgaagcaccaattatgaaattagaaaacaaaacagaattttttttagagtgtagcatagaaactttataaattgcaatttaaagtacttgggagaatagaatgaggagggggaatgtcctatctattgtaggcgtcagaaagaaggaagagaaaacgatgtctagcaatagcccaagaggtgagtagctgaacattttatagagatgaggagagactaactaaggactagggcgcatccctttaaaattgaaatgtatgggctggacgtggtggctcacgcctgtaagcccagcactttgggaggctgaggcgggcggatcacctgaggtcgggagtttgagaccagcctgaccaacatggagaaaccctgtctctactaaaaatacaaaaattagccgggcgtggtggcaggtgcctgtagtcccagttactcgggagactgaggcaggagaatcgcttgaacccgggaggcagaggttgcagtgagccgagatcactccactgtactccagcctggtgatagagcgagactccgtctcaaaaaacaaaacaaaacaaaacaaaaaccctcacacaaaaaccaagacaaatccccttgacacaagtttatctgtctaacaaacctgcacatgtatccctgaacttaaaagtgaaaaaaataaaggcaatatgtgtcagatttgtggtggtgtctgctgtttcacccccatatggaaatgtgtgcctgaaccccgcttttttccttgcttattgtggctaggatttgtgaatgtaattcacattctcaagaatgagcttttttggcttcatcgagttttcacgtagccctcattagtaactcctcttgttatttttgtccccttcctcacaccttcatttggaataatttgttgttctttttctaaattctttctgtcattgccaaggtcattaattacgtaggttttattcttttctaattcattcgctcatttgtagttttccgatttcatcatttaatgtgtaatatttacattatcattccaaatttataccatgctctaatttctgtttcagttttctcagctcattgatttattgagaagtctgtggcttcatttcaaaaatgcaaggatattagtcatctttgactgcagaatctagtgagtcccagagttcccaggatgtcctggtggtctttgttaggggtccaggctggctggggttcattggtgtccactgggggcagctcctgtgccttctggagtctctgagtctccttctgttgagtatgagatctgggtcccccgtgggctagtggatggccaggggggcgtagatgctgggttcagctggaggttccctttcctgggatggaggaggctcagttgcctcccgtctgagggtcaagctgtgcagctgggcgtaggtcacatcctggggggcttcagatgcagcagcctgcagcgggggagagtgagagggaaggaacgtggtgggggtgggggaggcctgggggcctggagaggaaaggactctctcagtgtccatctgtctgtcctcttctgcctgtctgtcctttgtgtccaggaattccccagacagtggggaaggaggagaggccatttctctcctaggtctggagtgtttcaccggggcatacgtcactgcctgggggtcttcatcgtgtgggctctgctggagagagacagtggtggggggtgtccttgagtccccctgacctcctggagtcaattttcctcactgttcccggggtgatccgattacatccctttcctgatggaatctcagggacgccctaaggccgtggagggtctggccgctccctccctgtggttctggcctctgctcctcactctgaccttgcccatttggctgcagcctcacgggccttcccgcaagagctcgctgctgcctcggggcctttgcacggctgtttcctctgcctgcaggggctcgtccatcagaggatcgtgtgccccactctgtccaggcttctcagatgacagctgagcagacagccctccccttccattcagactggccccactgccccacactctctgccctttccctggtttatgttccttacagcacgttgcactcctggacacgatgcatttatttgcattttgtctcccaccatgaggtgagctcaggaggcgggggcggctttgctccctgctgtgtctgcagctcccatggggagccccatccacagtgagctccctgggaacactcgctggttgaatgaatgaaggggagcctgggggaccgggtcggttcatttattcctcatcctcctgaggcctggggagagctctaacaaccagacggccaaacagaggatgaggagcaggaaggggacccgggaggaggcccacgaggtcccaggacagcagaagagagtgaggtcgcagcaggcgggaggcagcgtgctggacaaggaggggtccaccgtgacgatgctgagagccgggggaaggaggacagagaagtcctgctggattagatctggcaccaggaggcctttggtgcccgggacaggggcggggcctcaccggagcatccatctccaccccgtccttgggctgtgtgtccttcacggcagcatctgctgggccagagcaaggggttcatctcctgggaaggttctctgagacttctccgtcctgccagcccttgccctgttcccactagggtggctgagatccagggagggactgtgatgtccctgaggtcccacagtgtgggttcagaccgcctcccccttggccccagaccccccccagcctgtgctcctgcccccattgctacagaaactttggtgctcccttgcccaccccaggtgccctccgcttctagtcactcactgagaatttcctcctggatgtcagcaactgggctggccctgggggaggacacgggagtgtgaggggcagtgagggggctgtgcgggtggatgggagtcttgggtcttcatgcagaattacctcttctgcaggccctggtccttgggctctggccccgcagcccctgcaggacggtagaaatgggctggacagagatggacagagggtcaggcctgggagaattcgaaccagctgccctgcacacacaactcgagcggaaagaaggaaacctggaggcccactggcactgaggctttaaatacgtcgtaagtttaaagtaaaatcagaagaatcaagcacttccacacatgctcacatttattctcttctttctcgatcgatttttcacctgggaatttctggagcagtttttctaagctgactttcctttgtgtttggtttccctctggctggtgccccgagcccaccctcggtcggcccacgggttcccccattccctactcacccgatgtcctgtgtttgctctgatgccgatgtcggaggaggaggaagaggaggaggaacagcagcaggacgaaggccactgagaccccagtcacaacccccaggtgccttcccagaccttgagcgtgatgacgttgggaatggggatgacgtcattgatgtgagcaccttctgtgtgcaggcgcgagctaggtctttccttcatgagctccaaccctcacagcagttgtgcaacatgggattgccaaccccccaattcacagaggagcaaactgaggctcagagaggggaatcgcctgccccaggctcctcagcctggaagaagcaggtctgggaagggaaccagggactttgtgttttccccagctgtcctcctgctgccccaccaggtgcacacctgtttcctatttgacaggaggggcctgtcctagtgtctccatctggggctggtgtccttcttaggatcctcccttccccagcacagcagggcctgggagagggagtgggttgtgcaggacggaccctgcattgctctcactcccagctcagccaggtccgtttcccactctgccaagttcccatactcccatgcagaacctgtctggataggggctctgtgtgtatctgggaagggctgagggtagcaggaggacggtgcccctgccgagctgtgtacagggccaggtcccatgattttgcttacgcctcgcagcagttctgtgagctggatgggactgagccagtttacagctgctgaaactgagtcagagtagaaagttgacctgcctgggcccacggtgggatgcggcagagctgggaagtgaacccaggagtctgacccgcagcccttgttctctgcacctgagcggagccccggagctgcagggaaagagcctgaatgccccaaaccacggccctgctcccctcccctgccccaggtcaccgtcactgctgccggtgggacaggacagtcccctgaagaatcccatcaatgcaggcctctctcctttacacttggagaaactgaggcccaggcaggggaagggcttgtgcacttcaccatctccagaggagcctgaacctacgacagaacccacccctgcctcccctggtctccgcccacctcccactcagagcccctcactcaccactctggggatccaaccccgtgggggtgaggggctggtcctcagggcctgctgggtcaggacggggaggtgagggctggggctgccctgctccccacatcagcccggctgctcctcccccaggctgggccccaacacccaacatctctctctgcctcgacgcccgccccctcaccggcccagcctcagagccccggggagcctgtggcccctcctctggctctgcccagctccctggagggaagctcccgcttgagtctttgaggggaataggatcctcggggagactcagggctgcctggggggagaccacgctccctccgagcccagaggcctcagtgactcaccaggtgtgggggtggagcctgtaggtgagaggctgggatccccagagggtcctgggaataagcacagaaagggagcgaggcgctttggtgctgagtgaggaaacccgtccctccacctgcccgtggcttctctggaaactttcttctgctcacctttcaccatttgcatcccaggagatggggccaagtgtgggcatgcctggggagcccccgttgtcctcctcccctctgaggggtgagtctccctctggctgagcccccctcaaaccctcccccccgcaccgcgactccatcccagcccagagctctcctgggggcagggcctgagctgagcctttgagcttggacaggacagggtcagggccctcacctgagaccacgagctcctgggggtaactagggctggacagcaggtaggggtaggacctgattgcgctgtagcatcggtaggttccaccctgggctgaggtcacaggactcatggagaattcagcctggtgtctataagactggtactttgactttagacacagcgggggatgggctgccccctccttggtcaaaaagaaagtgtctatctgatgccatgactgacacagcagggtcacgttctctcctgaggccaccttggggcccggctgcaccgagagggcgggtatgtcagggatcagtcctggagagaagaaggatgggtgaggggctgccccaccttgctctgagctgagacctccccaggcctctctaggagcctctgtctctgttttctctgagtcttcccctccccacccatcccctgtctctgtctgtctctccctcccttgggaccacccccccgcctcatcccggccatcactaattggattcccccggcaggacctgtgcagagcctgggtccctgactgaacccgctgggctcctcacctgcgatcaggatgtccagggggtcgctgggggccgaccacctaggggagaggttgtgtgcaccgtagcatctgtactggcccccgtgggagcggctcacagggcccagggtgaagttggcctgggagagcccagcctggggctgctggccagagccctggacgaggtcatgttccccctccttgtacagaacgaatatgtcatagccgacatcagagcgacactgcagggtcaggctgcctccgcgggccacgacagagccctgcgggatcaggagggagggcttcctagacacgcctggagggaaagaggaattgggacttggaaggctggttcctcccccgccccttccttctcccgtcctggcgtcctggccctgcaggtctcactgtctctcacgctctgtgtctcggatcccggggcctccttctcacctgggtctgtcttggagtagttccagaccgatagtgtctctctgactcctggccactgtctgtctggtctgtcctctcctcattgagggacaggaaattgcagcaaatacacccattgccttcctgagtcgaccccttccaggtgagggtgactcaggctcctgtttccccatctgagcctccccgtggggtcttcctcacgccttcagcccatccatcaacacatccttctggggtccttgccatgatcagtcatcaaccaaactcccaacaacctatctggttccccaaaattatataaagaagtgtggtggctttttcacctgggaccagaatctccaggaggtcactggggttcgaccacacctgagggtttttcctgtaatagtaatagcatctgaacctccacctgcagctgggggtcacgggacccacagggaacagggcctgggatggccctttggggagcttctgtgagtacagggtcctggggagcttctgttcttcctcaacaagaacaaacgtgagaagtccgtccagtgtatcacactggagggtcacatttcctcctgaggccaccacaggactcggcagggctaaaagagtgggttctgcatagaatcctagcagagaaggaggcacgtcttaagtggggctccgacctcccacatcatccccagggctgggctgtgagaggtagacgtccctaagagccgaccctcttcctgagggcagagcctggggctgggacccctgagtgtcctctcacctgtcgccaccagctccagggggtcactgggctctgaccagcctgcaggggtctcatagtagcagcggtatcgccctgcactgtcatacaccgtggatggaatgtggaacttggccttggctccaggctccagtgggttctgtctcttccgggcccatgggagtccctccttatccagacggtactcctcagtctccaggggcccctgacaccagagggtcacgggcttcccccgagctatcacagaggctggctcagcccagagggtgggtttggggagggtgcctagaatggaatcagaggctggatcccaagacatccccatccctcagattccagctctcagccccaggaccctccagacgtccccatcagtcagcccagaacagctatctccacccccagctgcccggggttgggcccttgtccccagtgagaagaagggacctgggacagctggggacagactcacctgcctgcacgcaggtcctggggcccacactcagccctggaagagagttccctgtgagggatttgcccctggaagccccagcagttcctctcctccctcggagcctctgatagaccagattctctgatagaccagagcctcgctttagagtgagctccctccaagacggggaccttccttccccctcttcaaacctcaccgaggcaaatcaggactgagagggtgagggtcatggcgtcagctcccactggactcagctgtgcaggcggatgagaccacggtgcctggcaggacacaaaaacacgcagagtgtggactggaggctgggttctccctgtcacaagactgtcccatcggaagccccacaggaaggggaactgccctccccaagagcctggctctcatttccccagggatggggctggggtgagctccaggctctctgcagacatttcagacagaaatggggtctccctgagccctagccgctgtcggcctgacctatactcagctcaccaagggctagggcagagcaacaaaacccctccgctgggaatgaacctctaagtcgttcctgcctcctcagtgcccctttgtccttggccgtccctctgtgcctccaaccatgttcaaggttttcagaacaattactcaggtttgtcatctgattcatggggtggagtggggagctgaattttcttcctaattccaccgattatgtgaccttggacagcaaagtggcttgcttgagcctttctcttttggaacttgtggtcatgacctcagcttctcagagtggatgtggggctcagtggtgcctgggacatgggagggggcttggccatggtgaatttccagaccagattaagacaggagtggttggggtgtgagaggatcctggcattgagctccgtagtagaggaggatgattgatgccccaactcaagagcccacatctgctccaaataccaagaaatgctccttatgtttgaagttcccggcacggtggcccacccctgtaatctgagcacctagggaggctgaggatggaggatcccttgagctcagaagttcaagaccagcttggggaacatagtgagaccccgtctctgcatataacaaagaagaaataatcaggtatgtttgtgcacgactgcagtcccaactatttgggacactgaggtgggaagattgcttgagcctgggtggtccaggctgtagtgaggtatgatcatagcactgcactccagcctgggtgagagagcacgaccctgtctcaaaacatacatatatatatatatatatatatatatatatacacacacacacacatacacacatctgaaatatgtagattatacatccgaaatatgtagattatgaaagttttgtgcagaaaaagaaatgaaaagttctttaatttgagaaggttgcacatcaaagaacaaacttgaaagctgacagcctgcttgtgtctaagactgtcccagggtcattagggaggaaatttccacttctgtgtgggacagaagaggaaccccaggtcctcatggaaagggagggggtaggggctccagatgaagatgaaaagctgtggcccggcccggcgcggtggctcacgcctataatcccagcactttgggaggctgagatgggcagatcacgaggtcaggagatcgagaccatcctggctaacacggtgaaaacccgtctctacttaaaaaaaaaaaaatagaaaaaattaagcgggcgtggtggcgggcgcctgtagtcccggctacttgggaggctgaggcaggaaaatggtgtgaacctgggaggcagagcttgcagtgagctgagatcgcgccactgcactctagcctgggggacagagtgagactccgtctcaaaaaaagaaaaaaaaaaaaggaaaagaaaagctgtggttcacccttgctcgtgcttgtggacaggagctgggatatctctgcccactgactgaagtccatgatcagcatggggccacctctcccgtttttgtgtttaacagattccgccgccgtgcgtggtgcctcacgcctgtaatcccagcactttgggaggctgaggcgggcggatcacctgaggtcgggagtttgagaccagcctgaccaacatggagaaaccccgtttctactaaaaatacaaaaaaattagctgggcgtggtggtgcatgcctgtaatcccagctacttaggaggctgaggcaggagaattgcttgaacccgggaggcggaggttgtggtgagacgagatcaagccattgcactccagcctgggtgacaagagtgaaactccatctcaaaataataataataataataataaataaataaataaataaaatccttgaagtccacccggcgttctattgcactgcagctgacctggcactcaagccacaagatactgtccttcctactcatccctcccctttcttaaggcaaaggagcctcatgccatgaccactgccacaacaggcttacagggagaactgccagtgttctcttaagccctaagggatcttcagtcagcttgtggtgaaggcttcctggcctgctattcatccgtcatgacactgggctctgcccaggcccagggcaggtccagaaatgatctctaagagcaaagtccttgaattgaggacctgagagcctacttggcactctatcccctgttgttgagctggtacctaaggtgcaatacaaagtcccttttactttttcttccacttttctcaccccacagtcaacatggctgggaaggtgctgagtctcacttgaagccagcaagtctcagagtctcacctaaggcccacgacatagtacctgtatattgctgctggttattcagggcctgagagctcttcagttagcaagtgatgaattctgccaggactaaatccttccccacaaggcagcaatttcccttctggcctagggtatgtggaaaaatgttgtccaggagctagcatctgggatggggacctcaggactctgcctgttgccctatcttactgtggctgagtgggtatccaagataaaagacaaagtcctctttattcttccctctcctctcttcaatcagaaggaaggaatcacttttgttgctacaagttgtgctgccttgggtagtgggaaggatgaaacaagtacacccttagctacgtttgctgatttctctaaattcactggctccaaactcagcacagcactaggattttcccaggaatcacagtacttgtggcctagactctttcaagcttgtttaagaccccagaccaggcgcagtcactcacacctgtaatctcagcactttgggaggctgaggcgggcagatcatgaggtcaggagtttgagaccagcctggccaatatggccaaatcccatctctactaaaaatacaaaaattaactgggcatggtggcacgtgcctgtagtcccagctacttgggaggctgaggcagtagaatcgcttgaatctgggaggcaggggttgcagtgagccgagattgcaccactgcactccagcctgggatgacagagcgagactccatctaaaaccaaaacaaaacaaaaaaacaaacccagagcactttagcctgaggtctcaggtgggacttgctgaatctcaagttccaactgattttctgggcagttcccctttgggtagagctcatcaaatgctttctccatgaacgggcatcagttgcaatcagcccagtgtggctttccagtgtgacagggcagcattgagttcagtcctgccttctcccttccccaagcacacagtcgctgcttgggtgactccagcctgggtgacagagcgagactctgtctcaaaaaaaaaaaaaaaagaatgctgaaaatataccctaatatctttaatatcttctgacttttagggttatgctgaaaggttcactgttagcctgatgaggtacgtcttttggatgactggcctattctctctagctgccatgaataattttctttcacgttgatcttggagaagttgatgagtatgttgtttgtggatggttttgttgtatagtatctcactggggtgttctgagtttcctaaatgtgaatgttggctctctagtgcggttggggaaatttttattgataatattctcaaatatgtttctcaagttgcttgcttcctttcttactcagggatgccaatgggtcataggttttgtctctttccataatcccataattctcagaggttttgttcattcttttaaattctattttttttatttttgtctgactgcgttgattcacagaagcagtcttttttaattttgtttttatttttgttttctgagatggagtttcgctcttgttgcccaggctggagtgcaatggcacaatcttgactcactgcaacctccacctcatgggttcaagcaattctcctgcctcagcctccctagtaactgggattacaggcatgcaccaccacgtccggcaaattttgtatttttagtagagatggggtttcaccatgttggtcaggttggtctcgaactcctgacctcagttgatccgcccgcctcagcttcccgaagtgctgggattacaggcgtgagtcaccacgcctggccatagaagcagtctttgagctctgagattttcttctcaccttggtctattttgccgttactactttttattatattatgcaatttttgtaatgagtttttcagctctataaaatcagtttctttctttcttaaaatgtctatttcatcttccacctctggtgtcattttactgggttccttatatcccttggattgggtttcaactttcttctgaacctcagtgatcttagtttggcatccagattctgaattctatgtctgccattttagccatttcattaaaaatcacaggatggccacgtaataaatgaaagtagcactgcacctctatcaccccatccttcagtcaggatcagcttggaataaagagggacttctccttgctggaaaaagctgagaaaaagacctagcagcttccatcaacactttggacacctgtagatctcaccattggagattccctttcacagacactaagcacagctgacggagctacccagattccacacagctgcactcacccaggagaaaagactgacactgtgccccactgtccacggccatcacggctctggcactatgccattgtggaatgggatctacttctggatctctgggggacacgtagccgcagcatcctttcactgctgagggattgtcactgctgagccagccttgcctggtggcctgccatccccaggctgagctgttgctctacactaccctgtcgtgccaagctgcctagagccactcgatccacctttcccagtggcagatgcatcctgaccctcagggaccgagctgaagtggaaacggtgccttgggtgttcacaagagtgatggcctgtgcctgcgctagtgtgacacgctgtgtattagggttctctagagggacacaactaatggcgtatatatgtgtgtgtgtgtgtgtgtaaaatcgtatctggtgtatatatatgtgtgtatatatacacatgtcaaaaatatatatgtatatgtgtgtgtatatatgtgtgtgtatatatgtgtgtgtatatgtgtgtgtatatgtgtgtgtatatatgtgtgtgcatatatgtttgtgtgtatatatatgtgtgtgtatatgtgtgtgtatatatgtgtgtgtatatatgtttgtgtgtatatatatgtgtgtgtatatatatgtttgtttatatatatgtgtgtatatatatgtgtgtatatatataaaatcatatctggggtatatatatgtgtgtatatatacacatatcaaaaaatatatatgtatatatgtgtgtatatatatgtgtatgtatatatgtgtgtgtatatatgtgtgtatatatatgtgtgtgtatatatgtttgtgtgtatatatatgtgtatgtatatatgtgtatgtatatatgtgtgtgtatatatgtgtgtgtatatatatgtgtgtgtatatatatgtttgtgtgtatatatgtgtgtatatatatgtttctgtgtatatatatgtgtgtatatatatgtttgtgtgtatatatatataatcgtatctggtgtatatatatgtacacatatcaaaaaatatatgtgtgtgtacatatatgtgtgtatatatatgtgtgtgtatatatatgtgtgtacatatatgtttgtgtgtatatatgtgtgtgtatatgtgtgtatatatataccctacatatatataccatacatatatatgtatatacaccatatctatatgggtgtttattaagtattaacacactattatacaaaaattagcctggtgtgtgtgtgtgtgtatacatatatatatataaaatcatatatgtgtgtatatatatgcatgtgtgtatatatatgtgtgtgtatatatatgtgtgtatatatacacatacatatatatgtatatacaccatatatatatgtgtgtgtgtatatatatatatatacgagtgtttattaagtattaactcacactattatacaaaaattagcccagtgtggtggtgcacgcctgtagtcccagctactcaggaggctgaggcaggagaatcagttgaacccggcagacggaggttgcagtgagccgagattgcgccactgcactccagcctggtgacggagtgagactccatctcaaaaattggactctagcctgggcaacaagagcaaaactctgcctgtctcaaaaaaaaaaaaaaaaaaaaaaaagacatgatccaggcaacatcgatggggcatcaccagggtctgtcctgtctgttgcagtccacactttgccctgctcatagccccatgaacttcatgttcatgtcttttcacactataacttcttccaggtctttgctggacacattaaaaaaatatatatatatataaaatgcttcatgaaatttgttaatatccttgtgcagctgccatgctgatcttctctgtatcattccgattttggtatatgtgctgccaaagcaacaacacactggacacatttatctacaaatgaggcaaacaaagcatatgggtgtgaatggggagaagtacagtgttctctgttgtaattgaccccgaggtcatcctttatatttaccagctttgctgtctatcaccctctctaggttctgcttaccttctgccagagttcgcatgagaaactctacttgtctcaactatcggcccaatgaaataaacataaatttcaaccttgaggcatctgagcacctgattattgtgcctgtttcaggctttcttgtgggagttgcccattgtgttagtttcttggaggctgatataacaaattatcacaaagtattgaataaaaagaagataaacttattctctcagagttctgcaggccagaaataaaaaatcaaaatgttcatataatttcttctttctagaggctctgaagaagaaacttctgtgctttttccttctttctttctttcttttttttttttttagatggaatctcgctctgtctcccaggctggactgcagtagcgcgatctcggctcactgcaagctccgcctcccgggttcatgccattctcctgcctcagcctccccagtagctgggactacaggtgcccgccaccacacccggataatttttttgtatttttagtagagacggggtttcaccatgttagccaggatggtctcgatctcctgacctcatgatctgcccgcctcggcctcccaaagtgctgggattacaggcatgagccaccacgcccggccacttttgtgcctttttcttagactttggtccttgctggcatttcttggcattccttggtttacagacttctcattctaatctctgcctccatcttcacatggcatcctattcttctctgtgtgtcttcttcatgtcttataaagatgtgagcaatattggatttagatcctgcccgaagccagcatgaccacatcttaactaattatacctgcaaagatcctatttccaaataagttcatattcacagctacgggaggttaggatgtcaacatacctttttggagacacagtgcaaaccccaaccccagtcatggttacctccagctatggagaattcatcactgccacagtgaattatctaagctgcccaaccaccctctcttcaccaaatcctcctcctcatcgttaaagaaaattacccaggccagtatgatatctttctccttacctgctgatgtactgtaatgaggaaacccaaggaaaaccagctacatcatcattttaggtacagagtaatttttgtgttgttccctggtagtggtttcttaccaggcagatcttctaacccagggtcacctaaaagtgcagtcacaggatgtgcacatctcccaagtgtgtcatctgtaaagttagtgatagatgctgttcattaaactctcactttactcccaagcccatgcattctacctgtcaaaagacataccatgatttattgttttatttattttttattattttttatttttttgacggagttttgcccttgttgcccaggctggagtgcaatggtgcaatcttggctcactgcaacctccgcctcccgggttcaggcgattctcctgcctcagcctcccaagtagctgggattacaggcgagcagcaccacgcctggctaatttttgtatttttaatagagatggcgtttcaccatgttgatcgggctggtctcgaactcctgaactcaggtgatccacctgccctggcctcccaaaatgctgggattacaggcgtgagccaccgcacctggtccatttattgtctttatagctatatctgtatgtatatcatctacagctttctgtatgcttatttacagctactgtaacagaacccccaaactgcagagtctcattcacaaactgttcaatacatccaatttcaagaggccatttcaatgttctttcagtcccagtaaaaccaaaccactgcatagtacatatctcaggtcattcccagaatatcacgtggccatgttctcattccctccacggattttgtgggcatctggattcccattctgagaataagtcatgggttatttcgtttaaacaagtcagacattctgagtgctcacagacccctgcgaggagctccgtcaaacccattttcagcacaagcatccttcagactaaggaaggtttgctgccccctcgtgggtggaatgtgttccatggcatcaagttactaccaggcatcacatccagacctctctgctggtcacaggtgagactttcagctacagtggtggctacgtggtccttggtgagagggagtcactggtgttgggttcatgcatgtcctcctttcttgctccatggctatcccattcacgggcccctcctgcttgcattgggcctgctgaccccacagctggatggattccactgcatcaattctgtactccacctggtgcctcccccagctgtggactgctcttgcttgcttctcagggataggctcatggtagggagtataaatttctcctgtcctcacccagcctcagtcttggacaatttctatatgagtgggccttgagggtggagcttgctcagtgtttgtgtccttcttccccttggcagctggattgtacttggtagctttggttgacttgggcaggaatttcctgtcccttccctgacatttgtatatctgggattatggtttcaggaattttctgcagtactcctagggatagagggacttttaaatctaccttcttatatccacaatgggtttttacctggggcctgagattggctggtttttctgaacctctctcaatgacttcagtctttttctacacatgggagaagtatctgggcagggggtgagatttcaggccacacactgtggaaggtaatcatgtctgatcacaaattttgggtctccaccttacttccaatctatgttgtgaatgcccagttgagacccacggaaaagagctcatgggtgagtgtgaagtgcttctctgtcttaagttcccagagatccttgcctcttggaggccagcaaacactaactcttgaggaattcatgacaatatcatctgattcctccttcccagcttgtatggcagtctcccaccctcatgtgttctgcctttgtagagcctgtcatggcatcctactcctccttggaattcaggttactcagttgctcccagagctcggatttctgatggtctcaggtgaaatctacattatggagttgatctgagttttactcatggttaggattgcagagaagctctttttttggagtgggggagggagggggagggatggagtttcgcttttgttgcccaggctggagtgcaatggcgtgttcttggctcactacaacctctgcctcctgggttcaagtgattctcctgcctcagcctccccagtagctgggattacgggcatgtgccaccatgcccagctttttttttgtatttttagtagagagagggtttcactatgttttccaggctcgtctcaaactcctgacctcaggcaatccacccacctcagcctcccaaaatgctgggattacaggtgtgagccaccgcacccagctagtgaaactctttccagctccccaaaccctgggcagaagccgggatatgaattatttatttacttactgagttatgtgacataactcacaccatatgaaatgcaccattttttagtgtacaaataaatggattttagtgtcttcactatgctgtgcaatcaccatccctacctcatcccacagcatttccatcacctcagaaagaacccccaagtagtcagtcctagttcttcccttccctcagccttaagaaatcactagtctactctcagtttctatggctttgtctattctggatatttcatgtgcataaaatcacaccaaatacacgtccttttgtagctgttgatggaaaagaagtggttaccatgaaggaactgaagttttccaaagacaaaattataatgtggcctgacagaagaagtacagaaattgataacaaaaacaaatccatcacaacttatcatgaatctggtcatgccattattgcatattacacaaaagatgaaatgtctatcaacaaagctacaatcatgccacaggggccaacatttggacctgtgtccccattacctggtgatgacagatggaatgaaaccagagcccagctgcttgcacaaatggacattagtatgggagcaagagtggcagaggagcttatatttggaattgaccatattacaacaggtgcttccagtgattttgctaatgccactaaaatggcaaagcagatggttatcaaatttggaattagcgaaaagcttggagttatgacctacagtgacacagggaaactaagtccagaaactcaatctgctattgaacatgaaataagaaccattctaagggactcatataaatgagcaaaacttattcaaaattcaaataattgtatgacatggttataacaaaacaccttcctaccccatccatagtatttatttagatgaacaaattttctcagtcctgtatctatacaaatgaaaactagatatagtattgacgtttagctctgtttcagtctaggaataagtaatatttaccagtggacttgtgaacaattaataaccataatcaagaagtatttttaaaacatttagcatcttaaatttatatagtagagatggatagggtgatccatgaaagatgtttaattatataattattacatttcgctaaaaacttgttggtgatgttgaatggaaaatcaagtcaaaaataaagaagaatgatgcaaaccttaaaaaaaatgagcaaaacttatcttgaaaagtcatgcagaggagcataagaatctagcagaagctttattgacctatgagactttaggtgccaaagagattcaaattgttcttcaggggaaaaagttggaagtgagatgagaactctcttgatgtggatgctttgctggttttattgcaagaatataagtagcattgcagtagtctccttttgcaatgctttctcctcattattgacgttgtgtaatttaagggtgtgaaacattttgtcaatattttgtcacgtttacccaattttggttattctcattatgacacccattgcaaatcagcatcccatggcaaatatatttttaaaactaaagaactatcaggattaaagacagctcatttgggaaatgtcaattagttatgaagttgaaagtaactaatgattttatggttggttactctactagaggtgaataaaacttcagcctttagccttctatatacatcagtggaaacttaattaagatgcattaattatgttccagattgaccatcaataaaatgtttttaaatctaaatgtagagaattgtaagcatacagttgcaacccgaatttaaatgattataaccttttggcatggtgtgatggctcacgcctctaatcccagcactttgggaggctgaggcgagtggaaggcttgagtctaggagttcgagaccagcctggcctacacggcgaaaccctgtctctactaaaattaaaaaaaatagcctcctgtggtggtgcacaactgtaatcccagctactcagaaggctgaggcacaaaaatttgcttgaactggttgcagtgagccaagatctcacaactccactctagcctgggcgacagagtgaaactttgtctcagtaaataaataaataaataaataattgtaaccttttaaaaataaaaaaacccaaacaaatatatgtcctttttttgtcattattcatgatagctaaatagtgaaaacaacccaaatgtccatcaattggtgaatgcataaaccaaatgtgatataggcatagaatggaatattcttcaacagtagaaaggaacaaagaccaattacatgctctagcgtgcagagaccacgaaaacattttgctatgtgcaattggatttttgccattttgttgttgtttttaatgtagtacatttattttaatttattatttttttaaaaaaaattcaatagcttttggggaacaggtggtgtttggttacgtggataagctctttagtggtgatttttgagattttggtgcattcatcacccgagcagtgtacactgcacccaatgtgtagtcttttatcgctcatccccctcccattgttccctgtgagtccccagattccattatatccttcttatgcctttgcatcctcatagtttagctcccacttatgagaccatatgatgtttggttttccatttctgaattacttcacttggaataatggtctccaactgcatctaggttgctgcgaatgccattattttgtccctttttgtggctgagtagtattccgtgctgtgtgtgtgtatatacacacatacacatacatgtttttcatatgtttgtggaccgttcgtatatcttcttttgagagttgtcacaaagggaattggatttggagggaacaattttatggccatttttcagtataatcatcgggtgaagacagtgtctgttcggccagtgtcgctttaatccattacctgtagccaggaagggagacgtttatcgcagagataggcaccaacctggaatgctttcctcaaaggcgattaactgtagtgtgaacccgaaatttcaccgcagtttggtcctgatttggcacaagatatgctttatccactgatgtgaaatgtccaggtgtttttttgtacggttttgttgctgaaagacacaataccctctaatctaaggcatcctctccaaatcccactgaacaataccctctaatctaaggcatcctctccaaatcccactgaggcacaggagtgacactagagagggggtcacggagcttcctgagagagattcgcctcctgaaccctgggcagatcctccccaccttgggatctctgtgaacctctggggtcttctattcaatcaggaccaagttgtgaggtgggattccttccaggctacagtctcccctctccctctttcaattttatcaagacagatcagaggtttgtgggagggagtcatggcgtctcctccacagcccccagctgtgcagatggatgaggccaccgttcctggatggagtaaatctactgggaacctgggttctccatcacgaggttgtcccgtcatcagccccaaaagaaggggaactgccctctccgggagcttgactttcatttccccaaggctgggactggggcaggcaccaggctgtcttcagatacttcatacagaaatggtatctccctgacccttttctgcgatttgcctcatctgtcctcatctcatcaagggtcaggacgtaggagccgatagacccagcacctttctgagtctgtcctgtccaagtgagggtgagtgggggcttgttcttcttctcagagcctccctgtggggtcctcttccctccttcagcctgtccatcaacacagcattgcgggatccttaccatggcatccagccctggagatgcttcaggaaagttgcaggtccatgctgcaggacaggctcagatcagcagagacgcatctcacatcgggctgtgaaattcaagttgagctgcaattggcaatgagaagaaaaaaggagaaataaagaaatgctgactcttcttttgtctttggagtatgggttttatttcttccagtttccttcttagacttcccttcttttttttcttcctattttttttaatagtgttcaggtccccctcccttaaaagtaacctctgagtcattcctgcctccttggcgtccctcccacccccagccccgcttccttgggcattcccctgcatctcagtctgccttcaaggttttgggaacaagtacttgtcttgagctctgatttgggggtgggatagggagttaattttttctgaattgctcaccttcatccctgcgtgcatgaccttgggcagtaagtcccatctctgagcctcggtttcctcatttggagcctgttgtcatgaacccccctcctgagtggttttgggggccagtggtgcctgggtcatgggagggcctcagtcatggtacatttccagaccgggttaagtcttgggggttgaaacatgagtggatcctggtgttggactgcacagtcacggtgagtgacttatgtgctcaacagcccacatctgctcctaacactgggaaaacctacttataatgtgtctgaaatatgtagccatggtccaatgaagaaaatgagaaatgagacttcctgtcataggcaggaaaccttaagaagcagaagatgccagcgccgaggggctgctggtgacttgcaaagctgggggtcactaagggggaggtttctgcctctgtatgagacagaggagaaccccagggccctcacagacagggaggggtcggggttttggatgaaagtgggaagttgtggctccttctcccctgtgtttgtggatggcactgggatatctctgctcattgactcaggtccatggtcagccctgagccgcctcctccatgtgtgtgaaacagattcactgcagcgttgtcacacatgggcgtctgtcccacatgcgagtctgaggctcacactggaccctccctgctggttacagccctgagtagactcatgtggcactggcaggtggaaccatctccccttttccagccttaactcccagcacagccctggtggaaaccctctctggaagatgaggcatgtgggaagcatgtgtccaaaaatgacaaggagaaggaattatcctaatgatcaaaagtgctatgatgggccaggcaccgtggctcatgcctgcagtcccagcactttgggaggtcaaggcgggcgggtcacttgggcccaggagttcaagaccagcctgggcaacatggcaaaacctcatctctacaagaaatacaaaaattagctggatgtggtgtcatgaataatggcctccagctcatccaggttgctgcaaaactcaatcccttgtacatcagttgcaaaaaattaaaaatatctaagaatatacctaactgaggaggtgaaagatctctacaagaagaacaacaaaatgctgcagaaagaaatcgtagatgacacagcaaaatagaaatatatcccatgctcatggattggcagaatcaatattgtgaaaatgatcacacttcccaaagcaatatttaggttcaatgcaattcccatcaaaatatcaacatcatttttttcacagaattagaaaaaaatcctaaaattcatatggaaccaaaaagaggatgaataccaaagcaatcttaagcaaaaagacaaatgtaaatttaataaacatatcctaggctgaattgtagggggtttgtttttgctcacttcaacctccacctcccgggttcattcaagtgatcctcctgcctctgcctcccaagtagctgggattgcagcgtgcgccaccatgtccagctaatttttgtatttttagtagagatggggttttgccttgttggccatgctggtcttgaactcccggcctcaagtaatctgtggcctctgcctccctaggtgttgagattacaggcgtgagccaccgcacccgggcacattgcctctttttctattctcaagaaacatttgtgatgctctgggtgtgtttgtgtgtttcattagtgcgtcaatatttgtaagaaatcaccagtgaaacttcctgaactggagttgatacgatgggaacatttttattacagtcaatgtttttcacacacacacacacacacacacacacacatatatatacacacacatacacacacatttaaaatgagtcagattctctgattactcttacgttcattatgtaaactccagttttgaatatttcatccatttaatctgcattttctagtatattggtataggtttgcagcctgttctggggttagtttgtgaaaatgtgtgtaggatctgctgggctgtctgctggctcactcccatatggaaatgcgtgcctgctctttctttctcttgctcaatgtagttaggatttatgactgtaattaatattttcaagaatgagcttcattggctttgttgaattttcaagttttggtttttcctcatgagcaactcttcttcttcttattccctttcttacaccttcatttggaataattggttattctttttctaaattccttatacgaaagccaacgtcattcatttcctagtttttttttttcgtttctacttttttcatttgtggtttgtactttttcaatttcattgtgtgatgtgtaatatttatattgtgattcagtttaaagcacattcttacttctgattttagttttctcggttaactcattgattattgagaagtctgttgctttaattaaaaaatgtagggatattagttatttcgactgcagaatcaagtgagtcccaaagttcccagcatctcctcatggtctttgttaggggtccaggctgactggggttcattggtgtccactgggggcagctcccgtgccttcagcagtcctgagtctccttctactgagtgtggagtctgcgtaccctccgggctagtggatggccagggtggcgtagatgctgggctcagctggaggttccctttcctgggatggaggaggctcagttgccttccgtctgagggtcaagctgtgcagctgggcgtaggtcacatcctggggggcttcagatgcagcagcctgcagcgggggagagtgagaggtaaggaacgtggtgggggtgggggaggcctgggggcctggagaggaaaggactctctcagtgtccatctgtctgtcctcttctgcctgtctgtcctttgtgtccaggaattccccggacagtggggagggaggagaggccatttctctcctaggtctggagtgtttcaccggggcatatgtcactgcctgggggtcttcatcatgtgggctctgctggagagagacagtggtggggggtgtccttgagtccccctgacctcctggagtcaattttcctcactgttcccggggtgatccgattacatccctttcccgatggaatctcagggacgccctaaggccgtggagggtctggccgctcccttcctgtggttctggcctctgctcctcactttgaccttgcccatttggctgcagcctcatgggccttcccgcaagagctcgctgctgcctcggggcctttgcacggctgtttcctctgcctgcaggggctcgtccattagaggatcgtgtgccccactctgtccaggcttctcagatgacagctgagcagacagccctccccttccattcagactggccccactgccccacactctctgccctttccctggtgtatgttcctttaagcacgttgcactcctggacatggcgcatttatttgcattttgtctcccaccatgaggtgagctcaggaggcgggggcggctttgctccctgct
